United States Patent Application Publication US 2026/0375193 A1, published November 26, 2026 (application 19/487,314).

The application's sequence listing, which the Patent Office published only in electronic form, follows.

SEQUENCE LISTING (1131 sequences)

SEQ ID NO: 1 - RNA, 23 nt, Homo sapiens
  source 1..23: mol_type = mRNA
ttatggatgataaagactattat

SEQ ID NO: 2 - RNA, 23 nt, Homo sapiens
  source 1..23: mol_type = mRNA
tatggatgataaagactattatt

SEQ ID NO: 3 - RNA, 23 nt, Homo sapiens
  source 1..23: mol_type = mRNA
cctttatggatgataaagactat

SEQ ID NO: 4 - RNA, 23 nt, Homo sapiens
  source 1..23: mol_type = mRNA
gaatacaccatcatgaaagtttt

SEQ ID NO: 5 - RNA, 23 nt, Homo sapiens
  source 1..23: mol_type = mRNA
aagctctactttacgaagtgttt

SEQ ID NO: 6 - RNA, 23 nt, Homo sapiens
  source 1..23: mol_type = mRNA
agctctactttacgaagtgtttc

SEQ ID NO: 7 - RNA, 23 nt, Homo sapiens
  source 1..23: mol_type = mRNA
gtttatatatggattctgtaaga

SEQ ID NO: 8 - RNA, 23 nt, Homo sapiens
  source 1..23: mol_type = mRNA
gttgaacagctggtgaaatttta

SEQ ID NO: 9 - RNA, 23 nt, Homo sapiens
  source 1..23: mol_type = mRNA
tcctctctcaagtccgttaagta

SEQ ID NO: 10 - RNA, 23 nt, Homo sapiens
  source 1..23: mol_type = mRNA
ttgaacagctggtgaaattttac

SEQ ID NO: 11 - RNA, 23 nt, Homo sapiens
  source 1..23: mol_type = mRNA
tatatatggattctgtaagagat

SEQ ID NO: 12 - RNA, 23 nt, Homo sapiens
  source 1..23: mol_type = mRNA
aaatgtatcaagctctactttac

SEQ ID NO: 13 - RNA, 23 nt, Homo sapiens
  source 1..23: mol_type = mRNA
gtcactgcagtgtaaaatctcca

SEQ ID NO: 14 - RNA, 23 nt, Homo sapiens
  source 1..23: mol_type = mRNA
taggaggaaatagcaaaataaat

SEQ ID NO: 15 - RNA, 23 nt, Homo sapiens
  source 1..23: mol_type = mRNA
ctggaagaaatgattgcatcatt

SEQ ID NO: 16 - RNA, 23 nt, Homo sapiens
  source 1..23: mol_type = mRNA
tgcagtgtaaaatctccagtctc

SEQ ID NO: 17 - RNA, 23 nt, Homo sapiens
  source 1..23: mol_type = mRNA
cttgcagacttcagaaatgtctt

SEQ ID NO: 18 - RNA, 23 nt, Homo sapiens
  source 1..23: mol_type = mRNA
cagtgtaaaatctccagtctcca

SEQ ID NO: 19 - RNA, 23 nt, Homo sapiens
  source 1..23: mol_type = mRNA
cagctgcaaagttttcttcaaaa

SEQ ID NO: 20 - RNA, 23 nt, Homo sapiens
  source 1..23: mol_type = mRNA
gcagctgcaaagttttcttcaaa

SEQ ID NO: 21 - RNA, 23 nt, Homo sapiens
  source 1..23: mol_type = mRNA
atgataaagactattattcccta

SEQ ID NO: 22 - RNA, 23 nt, Homo sapiens
  source 1..23: mol_type = mRNA
tccagaaaatgtatcaagctcta

SEQ ID NO: 23 - RNA, 23 nt, Homo sapiens
  source 1..23: mol_type = mRNA
cattctcagtaccaataaagcaa

SEQ ID NO: 24 - RNA, 23 nt, Homo sapiens
  source 1..23: mol_type = mRNA
ttgataagattcgacgaaagaat

SEQ ID NO: 25 - RNA, 23 nt, Homo sapiens
  source 1..23: mol_type = mRNA
tgggtttatatatggattctgta

SEQ ID NO: 26 - RNA, 23 nt, Homo sapiens
  source 1..23: mol_type = mRNA
ctgctactaagcacaattccaaa

SEQ ID NO: 27 - RNA, 23 nt, Homo sapiens
  source 1..23: mol_type = mRNA
ccctccaagtcactgcagtgtaa

SEQ ID NO: 28 - RNA, 23 nt, Homo sapiens
  source 1..23: mol_type = mRNA
tgttgaacagctggtgaaatttt

SEQ ID NO: 29 - RNA, 23 nt, Homo sapiens
  source 1..23: mol_type = mRNA
atcatgaaagttttgctgctact

SEQ ID NO: 30 - RNA, 23 nt, Homo sapiens
  source 1..23: mol_type = mRNA
ttccagaaaatgtatcaagctct

SEQ ID NO: 31 - RNA, 23 nt, Homo sapiens
  source 1..23: mol_type = mRNA
caagtcactgcagtgtaaaatct

SEQ ID NO: 32 - RNA, 23 nt, Homo sapiens
  source 1..23: mol_type = mRNA
tcttagaatacattccagaaaat

SEQ ID NO: 33 - RNA, 23 nt, Homo sapiens
  source 1..23: mol_type = mRNA
gctgagtccatgggtttatatat

SEQ ID NO: 34 - RNA, 23 nt, Homo sapiens
  source 1..23: mol_type = mRNA
cgatcggctagagaccaatcttt

SEQ ID NO: 35 - RNA, 23 nt, Homo sapiens
  source 1..23: mol_type = mRNA
tttcctttatggatgataaagac

SEQ ID NO: 36 - RNA, 23 nt, Homo sapiens
  source 1..23: mol_type = mRNA
atgttgaacagctggtgaaattt

SEQ ID NO: 37 - RNA, 23 nt, Homo sapiens
  source 1..23: mol_type = mRNA
aaaatgtatcaagctctacttta

SEQ ID NO: 38 - RNA, 23 nt, Homo sapiens
  source 1..23: mol_type = mRNA
ctttatggatgataaagactatt

SEQ ID NO: 39 - RNA, 23 nt, Homo sapiens
  source 1..23: mol_type = mRNA
aggaggaaatagcaaaataaatt

SEQ ID NO: 40 - RNA, 23 nt, Homo sapiens
  source 1..23: mol_type = mRNA
aatgattgcatcattgataagat

SEQ ID NO: 41 - RNA, 23 nt, Homo sapiens
  source 1..23: mol_type = mRNA
catcatgaaagttttgctgctac

SEQ ID NO: 42 - RNA, 23 nt, Homo sapiens
  source 1..23: mol_type = mRNA
tttatgtgctggaagaaatgatt

SEQ ID NO: 43 - RNA, 23 nt, Homo sapiens
  source 1..23: mol_type = mRNA
taagagatgctgactattcctat

SEQ ID NO: 44 - RNA, 23 nt, Homo sapiens
  source 1..23: mol_type = mRNA
cctgctggaattctgcttctaca

SEQ ID NO: 45 - RNA, 23 nt, Homo sapiens
  source 1..23: mol_type = mRNA
ctgtaagagatgctgactattcc

SEQ ID NO: 46 - RNA, 23 nt, Homo sapiens
  source 1..23: mol_type = mRNA
tctaggaggaaatagcaaaataa

SEQ ID NO: 47 - RNA, 23 nt, Homo sapiens
  source 1..23: mol_type = mRNA
tacaccatcatgaaagttttgct

SEQ ID NO: 48 - RNA, 23 nt, Homo sapiens
  source 1..23: mol_type = mRNA
ggtatccggtcttagaatacatt

SEQ ID NO: 49 - RNA, 23 nt, Homo sapiens
  source 1..23: mol_type = mRNA
aagtccgttaagtagcatgaaat

SEQ ID NO: 50 - RNA, 23 nt, Homo sapiens
  source 1..23: mol_type = mRNA
agtcactgcagtgtaaaatctcc

SEQ ID NO: 51 - RNA, 23 nt, Homo sapiens
  source 1..23: mol_type = mRNA
ttctgtaagagatgctgactatt

SEQ ID NO: 52 - RNA, 23 nt, Homo sapiens
  source 1..23: mol_type = mRNA
tcctttatggatgataaagacta

SEQ ID NO: 53 - RNA, 23 nt, Homo sapiens
  source 1..23: mol_type = mRNA
atgggtttatatatggattctgt

SEQ ID NO: 54 - RNA, 23 nt, Homo sapiens
  source 1..23: mol_type = mRNA
tctctcaagtccgttaagtagca

SEQ ID NO: 55 - RNA, 23 nt, Homo sapiens
  source 1..23: mol_type = mRNA
agccctctgaacatgacatcttc

SEQ ID NO: 56 - RNA, 23 nt, Homo sapiens
  source 1..23: mol_type = mRNA
ctaaggaactttcagcaactgta

SEQ ID NO: 57 - RNA, 23 nt, Homo sapiens
  source 1..23: mol_type = mRNA
attctgtaagagatgctgactat

SEQ ID NO: 58 - RNA, 23 nt, Homo sapiens
  source 1..23: mol_type = mRNA
ctggtgaaattttacaaaggaaa

SEQ ID NO: 59 - RNA, 23 nt, Homo sapiens
  source 1..23: mol_type = mRNA
aatctaaggaactttcagcaact

SEQ ID NO: 60 - RNA, 23 nt, Homo sapiens
  source 1..23: mol_type = mRNA
gaagaaatgaggacaaattacat

SEQ ID NO: 61 - RNA, 23 nt, Homo sapiens
  source 1..23: mol_type = mRNA
agtaccaataaagcaagaatcaa

SEQ ID NO: 62 - RNA, 23 nt, Homo sapiens
  source 1..23: mol_type = mRNA
atgtcttcaagctggaatgaatt

SEQ ID NO: 63 - RNA, 23 nt, Homo sapiens
  source 1..23: mol_type = mRNA
cagcttaatattgtccagtacat

SEQ ID NO: 64 - RNA, 23 nt, Homo sapiens
  source 1..23: mol_type = mRNA
gggtttatatatggattctgtaa

SEQ ID NO: 65 - RNA, 23 nt, Homo sapiens
  source 1..23: mol_type = mRNA
ctccaagtcactgcagtgtaaaa

SEQ ID NO: 66 - RNA, 23 nt, Homo sapiens
  source 1..23: mol_type = mRNA
tggatgataaagactattattcc

SEQ ID NO: 67 - RNA, 23 nt, Homo sapiens
  source 1..23: mol_type = mRNA
atgattgcatcattgataagatt

SEQ ID NO: 68 - RNA, 23 nt, Homo sapiens
  source 1..23: mol_type = mRNA
gctggtgaaattttacaaaggaa

SEQ ID NO: 69 - RNA, 23 nt, Homo sapiens
  source 1..23: mol_type = mRNA
aggacaaattacatcaaagaact

SEQ ID NO: 70 - RNA, 23 nt, Homo sapiens
  source 1..23: mol_type = mRNA
gcagtgtaaaatctccagtctcc

SEQ ID NO: 71 - RNA, 23 nt, Homo sapiens
  source 1..23: mol_type = mRNA
catgaaagttttgctgctactaa

SEQ ID NO: 72 - RNA, 23 nt, Homo sapiens
  source 1..23: mol_type = mRNA
gatattaaaactgagctggaatc

SEQ ID NO: 73 - RNA, 23 nt, Homo sapiens
  source 1..23: mol_type = mRNA
ttttcctttatggatgataaaga

SEQ ID NO: 74 - RNA, 23 nt, Homo sapiens
  source 1..23: mol_type = mRNA
gattcccagtgggtattaaacaa

SEQ ID NO: 75 - RNA, 23 nt, Homo sapiens
  source 1..23: mol_type = mRNA
cacctctgctggatccagtacat

SEQ ID NO: 76 - RNA, 23 nt, Homo sapiens
  source 1..23: mol_type = mRNA
tggattctgtaagagatgctgac

SEQ ID NO: 77 - RNA, 23 nt, Homo sapiens
  source 1..23: mol_type = mRNA
actacatggagattgtcaacgta

SEQ ID NO: 78 - RNA, 23 nt, Homo sapiens
  source 1..23: mol_type = mRNA
aagtcactgcagtgtaaaatctc

SEQ ID NO: 79 - RNA, 23 nt, Homo sapiens
  source 1..23: mol_type = mRNA
aacagctggtgaaattttacaaa

SEQ ID NO: 80 - RNA, 23 nt, Homo sapiens
  source 1..23: mol_type = mRNA
tttatggatgataaagactatta

SEQ ID NO: 81 - RNA, 23 nt, Homo sapiens
  source 1..23: mol_type = mRNA
ccagctaagatttatcagaatgt

SEQ ID NO: 82 - RNA, 23 nt, Homo sapiens
  source 1..23: mol_type = mRNA
tagaatacattccagaaaatgta

SEQ ID NO: 83 - RNA, 23 nt, Homo sapiens
  source 1..23: mol_type = mRNA
tgataagattcgacgaaagaatt

SEQ ID NO: 84 - RNA, 23 nt, Homo sapiens
  source 1..23: mol_type = mRNA
ttaagtagcatgaaatcctcaat

SEQ ID NO: 85 - RNA, 23 nt, Homo sapiens
  source 1..23: mol_type = mRNA
cacctgagttcctttcctcctgt

SEQ ID NO: 86 - RNA, 23 nt, Homo sapiens
  source 1..23: mol_type = mRNA
ggcagctgcaaagttttcttcaa

SEQ ID NO: 87 - RNA, 23 nt, Homo sapiens
  source 1..23: mol_type = mRNA
agtagcatgaaatcctcaatttc

SEQ ID NO: 88 - RNA, 23 nt, Homo sapiens
  source 1..23: mol_type = mRNA
gtctaggaggaaatagcaaaata

SEQ ID NO: 89 - RNA, 23 nt, Homo sapiens
  source 1..23: mol_type = mRNA
ctgatattaaaactgagctggaa

SEQ ID NO: 90 - RNA, 23 nt, Homo sapiens
  source 1..23: mol_type = mRNA
cttaatattgtccagtacataaa

SEQ ID NO: 91 - RNA, 23 nt, Homo sapiens
  source 1..23: mol_type = mRNA
gctaagatttatcagaatgttga

SEQ ID NO: 92 - RNA, 23 nt, Homo sapiens
  source 1..23: mol_type = mRNA
tggtgaaattttacaaaggaaat

SEQ ID NO: 93 - RNA, 23 nt, Homo sapiens
  source 1..23: mol_type = mRNA
cgttaagtagcatgaaatcctca

SEQ ID NO: 94 - RNA, 23 nt, Homo sapiens
  source 1..23: mol_type = mRNA
ctgcagtgtaaaatctccagtct

SEQ ID NO: 95 - RNA, 23 nt, Homo sapiens
  source 1..23: mol_type = mRNA
tcatgaaagttttgctgctacta

SEQ ID NO: 96 - RNA, 23 nt, Homo sapiens
  source 1..23: mol_type = mRNA
tgatattaaaactgagctggaat

SEQ ID NO: 97 - RNA, 23 nt, Homo sapiens
  source 1..23: mol_type = mRNA
tccgttaagtagcatgaaatcct

SEQ ID NO: 98 - RNA, 23 nt, Homo sapiens
  source 1..23: mol_type = mRNA
ttgcagacttcagaaatgtcttc

SEQ ID NO: 99 - RNA, 23 nt, Homo sapiens
  source 1..23: mol_type = mRNA
agcttaatattgtccagtacata

SEQ ID NO: 100 - RNA, 23 nt, Homo sapiens
  source 1..23: mol_type = mRNA
gtccagctaagatttatcagaat

SEQ ID NO: 101 - RNA, 23 nt, Homo sapiens
  source 1..23: mol_type = mRNA
caagctctactttacgaagtgtt

SEQ ID NO: 102 - RNA, 23 nt, Homo sapiens
  source 1..23: mol_type = mRNA
cagctaagatttatcagaatgtt

SEQ ID NO: 103 - RNA, 23 nt, Homo sapiens
  source 1..23: mol_type = mRNA
ctcagtaccaataaagcaagaat

SEQ ID NO: 104 - RNA, 23 nt, Homo sapiens
  source 1..23: mol_type = mRNA
ctcctctctcaagtccgttaagt

SEQ ID NO: 105 - RNA, 23 nt, Homo sapiens
  source 1..23: mol_type = mRNA
tgtatcaagctctactttacgaa

SEQ ID NO: 106 - RNA, 23 nt, Homo sapiens
  source 1..23: mol_type = mRNA
gaatgttgaacagctggtgaaat

SEQ ID NO: 107 - RNA, 23 nt, Homo sapiens
  source 1..23: mol_type = mRNA
ctaagatttatcagaatgttgaa

SEQ ID NO: 108 - RNA, 23 nt, Homo sapiens
  source 1..23: mol_type = mRNA
agtccatgggtttatatatggat

SEQ ID NO: 109 - RNA, 23 nt, Homo sapiens
  source 1..23: mol_type = mRNA
ttgaagaaatgaggacaaattac

SEQ ID NO: 110 - RNA, 23 nt, Homo sapiens
  source 1..23: mol_type = mRNA
attgataagattcgacgaaagaa

SEQ ID NO: 111 - RNA, 23 nt, Homo sapiens
  source 1..23: mol_type = mRNA
gatgataaagactattattccct

SEQ ID NO: 112 - RNA, 23 nt, Homo sapiens
  source 1..23: mol_type = mRNA
gtagctgagtccatgggtttata

SEQ ID NO: 113 - RNA, 23 nt, Homo sapiens
  source 1..23: mol_type = mRNA
tttcctaagactgaggaagtaga

SEQ ID NO: 114 - RNA, 23 nt, Homo sapiens
  source 1..23: mol_type = mRNA
ctttccaacacctgagttccttt

SEQ ID NO: 115 - RNA, 23 nt, Homo sapiens
  source 1..23: mol_type = mRNA
atcattgataagattcgacgaaa

SEQ ID NO: 116 - RNA, 23 nt, Homo sapiens
  source 1..23: mol_type = mRNA
tagcatgaaatcctcaatttcca

SEQ ID NO: 117 - RNA, 23 nt, Homo sapiens
  source 1..23: mol_type = mRNA
agaaaatgtatcaagctctactt

SEQ ID NO: 118 - RNA, 23 nt, Homo sapiens
  source 1..23: mol_type = mRNA
gctgctactaagcacaattccaa

SEQ ID NO: 119 - RNA, 23 nt, Homo sapiens
  source 1..23: mol_type = mRNA
cagtactgtgggatctatctgta

SEQ ID NO: 120 - RNA, 23 nt, Homo sapiens
  source 1..23: mol_type = mRNA
ctaggaggaaatagcaaaataaa

SEQ ID NO: 121 - RNA, 23 nt, Homo sapiens
  source 1..23: mol_type = mRNA
aagaaatgattgcatcattgata

SEQ ID NO: 122 - RNA, 23 nt, Homo sapiens
  source 1..23: mol_type = mRNA
tccaagtcactgcagtgtaaaat

SEQ ID NO: 123 - RNA, 23 nt, Homo sapiens
  source 1..23: mol_type = mRNA
gagtccagctaagatttatcaga

SEQ ID NO: 124 - RNA, 23 nt, Homo sapiens
  source 1..23: mol_type = mRNA
attgcatcattgataagattcga

SEQ ID NO: 125 - RNA, 23 nt, Homo sapiens
  source 1..23: mol_type = mRNA
ccgttaagtagcatgaaatcctc

SEQ ID NO: 126 - RNA, 23 nt, Homo sapiens
  source 1..23: mol_type = mRNA
actaataacagatccacgctttc

SEQ ID NO: 127 - RNA, 23 nt, Homo sapiens
  source 1..23: mol_type = mRNA
cagaaaatgtatcaagctctact

SEQ ID NO: 128 - RNA, 23 nt, Homo sapiens
  source 1..23: mol_type = mRNA
gtccatgggtttatatatggatt

SEQ ID NO: 129 - RNA, 23 nt, Homo sapiens
  source 1..23: mol_type = mRNA
gaaaatgtatcaagctctacttt

SEQ ID NO: 130 - RNA, 23 nt, Homo sapiens
  source 1..23: mol_type = mRNA
agtccgttaagtagcatgaaatc

SEQ ID NO: 131 - RNA, 23 nt, Homo sapiens
  source 1..23: mol_type = mRNA
tgataaagactattattccctat

SEQ ID NO: 132 - RNA, 23 nt, Homo sapiens
  source 1..23: mol_type = mRNA
atgaaagttttgctgctactaag

SEQ ID NO: 133 - RNA, 23 nt, Homo sapiens
  source 1..23: mol_type = mRNA
ctctcctctctcaagtccgttaa

SEQ ID NO: 134 - RNA, 23 nt, Homo sapiens
  source 1..23: mol_type = mRNA
agaggaccgatgagaataactac

SEQ ID NO: 135 - RNA, 23 nt, Homo sapiens
  source 1..23: mol_type = mRNA
aatacaccatcatgaaagttttg

SEQ ID NO: 136 - RNA, 23 nt, Homo sapiens
  source 1..23: mol_type = mRNA
atttgaagaaatgaggacaaatt

SEQ ID NO: 137 - RNA, 23 nt, Homo sapiens
  source 1..23: mol_type = mRNA
atggatgataaagactattattc

SEQ ID NO: 138 - RNA, 23 nt, Homo sapiens
  source 1..23: mol_type = mRNA
attaaaactgagctggaatctaa

SEQ ID NO: 139 - RNA, 23 nt, Homo sapiens
  source 1..23: mol_type = mRNA
gagaataactacatggagattgt

SEQ ID NO: 140 - RNA, 23 nt, Homo sapiens
  source 1..23: mol_type = mRNA
tgtaagagatgctgactattcct

SEQ ID NO: 141 - RNA, 23 nt, Homo sapiens
  source 1..23: mol_type = mRNA
accatcatgaaagttttgctgct

SEQ ID NO: 142 - RNA, 23 nt, Homo sapiens
  source 1..23: mol_type = mRNA
agtacataaaaccagaaccagat

SEQ ID NO: 143 - RNA, 23 nt, Homo sapiens
  source 1..23: mol_type = mRNA
ttttgctgctactaagcacaatt

SEQ ID NO: 144 - RNA, 23 nt, Homo sapiens
  source 1..23: mol_type = mRNA
ttcgactgcagctcacctttgaa

SEQ ID NO: 145 - RNA, 23 nt, Homo sapiens
  source 1..23: mol_type = mRNA
tattaaaactgagctggaatcta

SEQ ID NO: 146 - RNA, 23 nt, Homo sapiens
  source 1..23: mol_type = mRNA
tttagtggagtcatggaaatcac

SEQ ID NO: 147 - RNA, 23 nt, Homo sapiens
  source 1..23: mol_type = mRNA
aaagttttgctgctactaagcac

SEQ ID NO: 148 - RNA, 23 nt, Homo sapiens
  source 1..23: mol_type = mRNA
tttgaagaaatgaggacaaatta

SEQ ID NO: 149 - RNA, 23 nt, Homo sapiens
  source 1..23: mol_type = mRNA
tactcaaggaagcagcaaagaaa

SEQ ID NO: 150 - RNA, 23 nt, Homo sapiens
  source 1..23: mol_type = mRNA
ttatatatggattctgtaagaga

SEQ ID NO: 151 - RNA, 23 nt, Homo sapiens
  source 1..23: mol_type = mRNA
tggtaactaagtgtcccaacaat

SEQ ID NO: 152 - RNA, 23 nt, Homo sapiens
  source 1..23: mol_type = mRNA
tatcaagctctactttacgaagt

SEQ ID NO: 153 - RNA, 23 nt, Homo sapiens
  source 1..23: mol_type = mRNA
gagaggaccgatgagaataacta

SEQ ID NO: 154 - RNA, 23 nt, Homo sapiens
  source 1..23: mol_type = mRNA
gagcttttagcagctcatgtcta

SEQ ID NO: 155 - RNA, 23 nt, Homo sapiens
  source 1..23: mol_type = mRNA
atttatcagaatgttgaacagct

SEQ ID NO: 156 - RNA, 23 nt, Homo sapiens
  source 1..23: mol_type = mRNA
aatgtatcaagctctactttacg

SEQ ID NO: 157 - RNA, 23 nt, Homo sapiens
  source 1..23: mol_type = mRNA
ctattccaaacaacagtactcaa

SEQ ID NO: 158 - RNA, 23 nt, Homo sapiens
  source 1..23: mol_type = mRNA
ataaagactattattccctatca

SEQ ID NO: 159 - RNA, 23 nt, Homo sapiens
  source 1..23: mol_type = mRNA
tctgaacatgacatcttcggttt

SEQ ID NO: 160 - RNA, 23 nt, Homo sapiens
  source 1..23: mol_type = mRNA
aatgttgaacagctggtgaaatt

SEQ ID NO: 161 - RNA, 23 nt, Homo sapiens
  source 1..23: mol_type = mRNA
ggatgataaagactattattccc

SEQ ID NO: 162 - RNA, 23 nt, Homo sapiens
  source 1..23: mol_type = mRNA
cattccagaaaatgtatcaagct

SEQ ID NO: 163 - RNA, 23 nt, Homo sapiens
  source 1..23: mol_type = mRNA
gaaatgaggacaaattacatcaa

SEQ ID NO: 164 - RNA, 23 nt, Homo sapiens
  source 1..23: mol_type = mRNA
atgtctaggaggaaatagcaaaa

SEQ ID NO: 165 - RNA, 23 nt, Homo sapiens
  source 1..23: mol_type = mRNA
gctattccaaacaacagtactca

SEQ ID NO: 166 - RNA, 23 nt, Homo sapiens
  source 1..23: mol_type = mRNA
gattctgtaagagatgctgacta

SEQ ID NO: 167 - RNA, 23 nt, Homo sapiens
  source 1..23: mol_type = mRNA
ctgcagctcacctttgaagaata

SEQ ID NO: 168 - RNA, 23 nt, Homo sapiens
  source 1..23: mol_type = mRNA
tgagatcatttatgtctgactct

SEQ ID NO: 169 - RNA, 23 nt, Homo sapiens
  source 1..23: mol_type = mRNA
ctctgaacatgacatcttcggtt

SEQ ID NO: 170 - RNA, 23 nt, Homo sapiens
  source 1..23: mol_type = mRNA
ctctcaagtccgttaagtagcat

SEQ ID NO: 171 - RNA, 23 nt, Homo sapiens
  source 1..23: mol_type = mRNA
ccagtactgtgggatctatctgt

SEQ ID NO: 172 - RNA, 23 nt, Homo sapiens
  source 1..23: mol_type = mRNA
tcaagctctactttacgaagtgt

SEQ ID NO: 173 - RNA, 23 nt, Homo sapiens
  source 1..23: mol_type = mRNA
ttaaaactgagctggaatctaag

SEQ ID NO: 174 - RNA, 23 nt, Homo sapiens
  source 1..23: mol_type = mRNA
tcagtaccaataaagcaagaatc

SEQ ID NO: 175 - RNA, 23 nt, Homo sapiens
  source 1..23: mol_type = mRNA
gtcttagaatacattccagaaaa

SEQ ID NO: 176 - RNA, 23 nt, Homo sapiens
  source 1..23: mol_type = mRNA
agaaatgattgcatcattgataa

SEQ ID NO: 177 - RNA, 23 nt, Homo sapiens
  source 1..23: mol_type = mRNA
agctggtgaaattttacaaagga

SEQ ID NO: 178 - RNA, 23 nt, Homo sapiens
  source 1..23: mol_type = mRNA
aaatgaggacaaattacatcaaa

SEQ ID NO: 179 - RNA, 23 nt, Homo sapiens
  source 1..23: mol_type = mRNA
tttccggtgctattccaaacaac

SEQ ID NO: 180 - RNA, 23 nt, Homo sapiens
  source 1..23: mol_type = mRNA
caactcaaggtgctctgtttcca

SEQ ID NO: 181 - RNA, 23 nt, Homo sapiens
  source 1..23: mol_type = mRNA
tggaagaaatgattgcatcattg

SEQ ID NO: 182 - RNA, 23 nt, Homo sapiens
  source 1..23: mol_type = mRNA
aaagcaagaatcaaccaagcatt

SEQ ID NO: 183 - RNA, 23 nt, Homo sapiens
  source 1..23: mol_type = mRNA
tgagctggaatctaaggaacttt

SEQ ID NO: 184 - RNA, 23 nt, Homo sapiens
  source 1..23: mol_type = mRNA
ccagcttaatattgtccagtaca

SEQ ID NO: 185 - RNA, 23 nt, Homo sapiens
  source 1..23: mol_type = mRNA
ccatgggtttatatatggattct

SEQ ID NO: 186 - RNA, 23 nt, Homo sapiens
  source 1..23: mol_type = mRNA
ttaatattgtccagtacataaaa

SEQ ID NO: 187 - RNA, 23 nt, Homo sapiens
  source 1..23: mol_type = mRNA
atacattccagaaaatgtatcaa

SEQ ID NO: 188 - RNA, 23 nt, Homo sapiens
  source 1..23: mol_type = mRNA
ggctctcctctctcaagtccgtt

SEQ ID NO: 189 - RNA, 23 nt, Homo sapiens
  source 1..23: mol_type = mRNA
ctactaagcacaattccaaagga

SEQ ID NO: 190 - RNA, 23 nt, Homo sapiens
  source 1..23: mol_type = mRNA
ctgagctggaatctaaggaactt

SEQ ID NO: 191 - RNA, 23 nt, Homo sapiens
  source 1..23: mol_type = mRNA
ccaagtcactgcagtgtaaaatc

SEQ ID NO: 192 - RNA, 23 nt, Homo sapiens
  source 1..23: mol_type = mRNA
gtatcaagctctactttacgaag

SEQ ID NO: 193 - RNA, 23 nt, Homo sapiens
  source 1..23: mol_type = mRNA
cggtgctattccaaacaacagta

SEQ ID NO: 194 - RNA, 23 nt, Homo sapiens
  source 1..23: mol_type = mRNA
tgctattccaaacaacagtactc

SEQ ID NO: 195 - RNA, 23 nt, Homo sapiens
  source 1..23: mol_type = mRNA
catgagtccagctaagatttatc

SEQ ID NO: 196 - RNA, 23 nt, Homo sapiens
  source 1..23: mol_type = mRNA
cctgcttgcagacttcagaaatg

SEQ ID NO: 197 - RNA, 23 nt, Homo sapiens
  source 1..23: mol_type = mRNA
atgtatcaagctctactttacga

SEQ ID NO: 198 - RNA, 23 nt, Homo sapiens
  source 1..23: mol_type = mRNA
tcccagtgggtattaaacaagaa

SEQ ID NO: 199 - RNA, 23 nt, Homo sapiens
  source 1..23: mol_type = mRNA
aatgtcttcaagctggaatgaat

SEQ ID NO: 200 - RNA, 23 nt, Homo sapiens
  source 1..23: mol_type = mRNA
taagtagcatgaaatcctcaatt

SEQ ID NO: 201 - RNA, 23 nt, Homo sapiens
  source 1..23: mol_type = mRNA
ttccactacaggattggtgctca

SEQ ID NO: 202 - RNA, 23 nt, Homo sapiens
  source 1..23: mol_type = mRNA
gtaactaagtgtcccaacaattc

SEQ ID NO: 203 - RNA, 23 nt, Homo sapiens
  source 1..23: mol_type = mRNA
gaagaaatgattgcatcattgat

SEQ ID NO: 204 - RNA, 23 nt, Homo sapiens
  source 1..23: mol_type = mRNA
cttgagatcatttatgtctgact

SEQ ID NO: 205 - RNA, 23 nt, Homo sapiens
  source 1..23: mol_type = mRNA
taatattgtccagtacataaaac

SEQ ID NO: 206 - RNA, 23 nt, Homo sapiens
  source 1..23: mol_type = mRNA
gaagcatgagtccagctaagatt

SEQ ID NO: 207 - RNA, 23 nt, Homo sapiens
  source 1..23: mol_type = mRNA
catttgaagaaatgaggacaaat

SEQ ID NO: 208 - RNA, 23 nt, Homo sapiens
  source 1..23: mol_type = mRNA
cctccaagtcactgcagtgtaaa

SEQ ID NO: 209 - RNA, 23 nt, Homo sapiens
  source 1..23: mol_type = mRNA
ttctcagtaccaataaagcaaga

SEQ ID NO: 210 - RNA, 23 nt, Homo sapiens
  source 1..23: mol_type = mRNA
ggaccgatgagaataactacatg

SEQ ID NO: 211 - RNA, 23 nt, Homo sapiens
  source 1..23: mol_type = mRNA
ctatctgtagccctgtaaacaat

SEQ ID NO: 212 - RNA, 23 nt, Homo sapiens
  source 1..23: mol_type = mRNA
gtagcatgaaatcctcaatttcc

SEQ ID NO: 213 - RNA, 23 nt, Homo sapiens
  source 1..23: mol_type = mRNA
ggtgctattccaaacaacagtac

SEQ ID NO: 214 - RNA, 23 nt, Homo sapiens
  source 1..23: mol_type = mRNA
cactgcagtgtaaaatctccagt

SEQ ID NO: 215 - RNA, 23 nt, Homo sapiens
  source 1..23: mol_type = mRNA
taaagactattattccctatcag

SEQ ID NO: 216 - RNA, 23 nt, Homo sapiens
  source 1..23: mol_type = mRNA
tttgctgctactaagcacaattc

SEQ ID NO: 217 - RNA, 23 nt, Homo sapiens
  source 1..23: mol_type = mRNA
tccaacacctgagttcctttcct

SEQ ID NO: 218 - RNA, 23 nt, Homo sapiens
  source 1..23: mol_type = mRNA
tctgtaagagatgctgactattc

SEQ ID NO: 219 - RNA, 23 nt, Homo sapiens
  source 1..23: mol_type = mRNA
ggatctatctgtagccctgtaaa

SEQ ID NO: 220 - RNA, 23 nt, Homo sapiens
  source 1..23: mol_type = mRNA
ctgcttgcagacttcagaaatgt

SEQ ID NO: 221 - RNA, 23 nt, Homo sapiens
  source 1..23: mol_type = mRNA
tactttagtggagtcatggaaat

SEQ ID NO: 222 - RNA, 23 nt, Homo sapiens
  source 1..23: mol_type = mRNA
aatgaggacaaattacatcaaag

SEQ ID NO: 223 - RNA, 23 nt, Homo sapiens
  source 1..23: mol_type = mRNA
gtttccggtgctattccaaacaa

SEQ ID NO: 224 - RNA, 23 nt, synthetic construct
  source 1..23: mol_type = other RNA
ataatagtctttatcatccataa

SEQ ID NO: 225 - RNA, 23 nt, synthetic construct
  source 1..23: mol_type = other RNA
aataatagtctttatcatccata

SEQ ID NO: 226 - RNA, 23 nt, synthetic construct
  source 1..23: mol_type = other RNA
atagtctttatcatccataaagg

SEQ ID NO: 227 - RNA, 23 nt, synthetic construct
  source 1..23: mol_type = other RNA
aaaactttcatgatggtgtattc

SEQ ID NO: 228 - RNA, 23 nt, synthetic construct
  source 1..23: mol_type = other RNA
aaacacttcgtaaagtagagctt

SEQ ID NO: 229 - RNA, 23 nt, synthetic construct
  source 1..23: mol_type = other RNA
gaaacacttcgtaaagtagagct

SEQ ID NO: 230 - RNA, 23 nt, synthetic construct
  source 1..23: mol_type = other RNA
tcttacagaatccatatataaac

SEQ ID NO: 231 - RNA, 23 nt, synthetic construct
  source 1..23: mol_type = other RNA
taaaatttcaccagctgttcaac

SEQ ID NO: 232 - RNA, 23 nt, synthetic construct
  source 1..23: mol_type = other RNA
tacttaacggacttgagagagga

SEQ ID NO: 233 - RNA, 23 nt, synthetic construct
  source 1..23: mol_type = other RNA
gtaaaatttcaccagctgttcaa

SEQ ID NO: 234 - RNA, 23 nt, synthetic construct
  source 1..23: mol_type = other RNA
atctcttacagaatccatatata

SEQ ID NO: 235 - RNA, 23 nt, synthetic construct
  source 1..23: mol_type = other RNA
gtaaagtagagcttgatacattt

SEQ ID NO: 236 - RNA, 23 nt, synthetic construct
  source 1..23: mol_type = other RNA
tggagattttacactgcagtgac

SEQ ID NO: 237 - RNA, 23 nt, synthetic construct
  source 1..23: mol_type = other RNA
atttattttgctatttcctccta

SEQ ID NO: 238 - RNA, 23 nt, synthetic construct
  source 1..23: mol_type = other RNA
aatgatgcaatcatttcttccag

SEQ ID NO: 239 - RNA, 23 nt, synthetic construct
  source 1..23: mol_type = other RNA
gagactggagattttacactgca

SEQ ID NO: 240 - RNA, 23 nt, synthetic construct
  source 1..23: mol_type = other RNA
aagacatttctgaagtctgcaag

SEQ ID NO: 241 - RNA, 23 nt, synthetic construct
  source 1..23: mol_type = other RNA
tggagactggagattttacactg

SEQ ID NO: 242 - RNA, 23 nt, synthetic construct
  source 1..23: mol_type = other RNA
ttttgaagaaaactttgcagctg

SEQ ID NO: 243 - RNA, 23 nt, synthetic construct
  source 1..23: mol_type = other RNA
tttgaagaaaactttgcagctgc

SEQ ID NO: 244 - RNA, 23 nt, synthetic construct
  source 1..23: mol_type = other RNA
tagggaataatagtctttatcat

SEQ ID NO: 245 - RNA, 23 nt, synthetic construct
  source 1..23: mol_type = other RNA
tagagcttgatacattttctgga

SEQ ID NO: 246 - RNA, 23 nt, synthetic construct
  source 1..23: mol_type = other RNA
ttgctttattggtactgagaatg

SEQ ID NO: 247 - RNA, 23 nt, synthetic construct
  source 1..23: mol_type = other RNA
attctttcgtcgaatcttatcaa

SEQ ID NO: 248 - RNA, 23 nt, synthetic construct
  source 1..23: mol_type = other RNA
tacagaatccatatataaaccca

SEQ ID NO: 249 - RNA, 23 nt, synthetic construct
  source 1..23: mol_type = other RNA
tttggaattgtgcttagtagcag

SEQ ID NO: 250 - RNA, 23 nt, synthetic construct
  source 1..23: mol_type = other RNA
ttacactgcagtgacttggaggg

SEQ ID NO: 251 - RNA, 23 nt, synthetic construct
  source 1..23: mol_type = other RNA
aaaatttcaccagctgttcaaca

SEQ ID NO: 252 - RNA, 23 nt, synthetic construct
  source 1..23: mol_type = other RNA
agtagcagcaaaactttcatgat

SEQ ID NO: 253 - RNA, 23 nt, synthetic construct
  source 1..23: mol_type = other RNA
agagcttgatacattttctggaa

SEQ ID NO: 254 - RNA, 23 nt, synthetic construct
  source 1..23: mol_type = other RNA
agattttacactgcagtgacttg

SEQ ID NO: 255 - RNA, 23 nt, synthetic construct
  source 1..23: mol_type = other RNA
attttctggaatgtattctaaga

SEQ ID NO: 256 - RNA, 23 nt, synthetic construct
  source 1..23: mol_type = other RNA
atatataaacccatggactcagc

SEQ ID NO: 257 - RNA, 23 nt, synthetic construct
  source 1..23: mol_type = other RNA
aaagattggtctctagccgatcg

SEQ ID NO: 258 - RNA, 23 nt, synthetic construct
  source 1..23: mol_type = other RNA
gtctttatcatccataaaggaaa

SEQ ID NO: 259 - RNA, 23 nt, synthetic construct
  source 1..23: mol_type = other RNA
aaatttcaccagctgttcaacat

SEQ ID NO: 260 - RNA, 23 nt, synthetic construct
  source 1..23: mol_type = other RNA
taaagtagagcttgatacatttt

SEQ ID NO: 261 - RNA, 23 nt, synthetic construct
  source 1..23: mol_type = other RNA
aatagtctttatcatccataaag

SEQ ID NO: 262 - RNA, 23 nt, synthetic construct
  source 1..23: mol_type = other RNA
aatttattttgctatttcctcct

SEQ ID NO: 263 - RNA, 23 nt, synthetic construct
  source 1..23: mol_type = other RNA
atcttatcaatgatgcaatcatt

SEQ ID NO: 264 - RNA, 23 nt, synthetic construct
  source 1..23: mol_type = other RNA
gtagcagcaaaactttcatgatg

SEQ ID NO: 265 - RNA, 23 nt, synthetic construct
  source 1..23: mol_type = other RNA
aatcatttcttccagcacataaa

SEQ ID NO: 266 - RNA, 23 nt, synthetic construct
  source 1..23: mol_type = other RNA
ataggaatagtcagcatctctta

SEQ ID NO: 267 - RNA, 23 nt, synthetic construct
  source 1..23: mol_type = other RNA
tgtagaagcagaattccagcagg

SEQ ID NO: 268 - RNA, 23 nt, synthetic construct
  source 1..23: mol_type = other RNA
ggaatagtcagcatctcttacag

SEQ ID NO: 269 - RNA, 23 nt, synthetic construct
  source 1..23: mol_type = other RNA
ttattttgctatttcctcctaga

SEQ ID NO: 270 - RNA, 23 nt, synthetic construct
  source 1..23: mol_type = other RNA
agcaaaactttcatgatggtgta

SEQ ID NO: 271 - RNA, 23 nt, synthetic construct
  source 1..23: mol_type = other RNA
aatgtattctaagaccggatacc

SEQ ID NO: 272 - RNA, 23 nt, synthetic construct
  source 1..23: mol_type = other RNA
atttcatgctacttaacggactt

SEQ ID NO: 273 - RNA, 23 nt, synthetic construct
  source 1..23: mol_type = other RNA
ggagattttacactgcagtgact

SEQ ID NO: 274 - RNA, 23 nt, synthetic construct
  source 1..23: mol_type = other RNA
aatagtcagcatctcttacagaa

SEQ ID NO: 275 - RNA, 23 nt, synthetic construct
  source 1..23: mol_type = other RNA
tagtctttatcatccataaagga

SEQ ID NO: 276 - RNA, 23 nt, synthetic construct
  source 1..23: mol_type = other RNA
acagaatccatatataaacccat

SEQ ID NO: 277 - RNA, 23 nt, synthetic construct
  source 1..23: mol_type = other RNA
tgctacttaacggacttgagaga

SEQ ID NO: 278 - RNA, 23 nt, synthetic construct
  source 1..23: mol_type = other RNA
gaagatgtcatgttcagagggct

SEQ ID NO: 279 - RNA, 23 nt, synthetic construct
  source 1..23: mol_type = other RNA
tacagttgctgaaagttccttag

SEQ ID NO: 280 - RNA, 23 nt, synthetic construct
  source 1..23: mol_type = other RNA
atagtcagcatctcttacagaat

SEQ ID NO: 281 - RNA, 23 nt, synthetic construct
  source 1..23: mol_type = other RNA
tttcctttgtaaaatttcaccag

SEQ ID NO: 282 - RNA, 23 nt, synthetic construct
  source 1..23: mol_type = other RNA
agttgctgaaagttccttagatt

SEQ ID NO: 283 - RNA, 23 nt, synthetic construct
  source 1..23: mol_type = other RNA
atgtaatttgtcctcatttcttc

SEQ ID NO: 284 - RNA, 23 nt, synthetic construct
  source 1..23: mol_type = other RNA
ttgattcttgctttattggtact

SEQ ID NO: 285 - RNA, 23 nt, synthetic construct
  source 1..23: mol_type = other RNA
aattcattccagcttgaagacat

SEQ ID NO: 286 - RNA, 23 nt, synthetic construct
  source 1..23: mol_type = other RNA
atgtactggacaatattaagctg

SEQ ID NO: 287 - RNA, 23 nt, synthetic construct
  source 1..23: mol_type = other RNA
ttacagaatccatatataaaccc

SEQ ID NO: 288 - RNA, 23 nt, synthetic construct
  source 1..23: mol_type = other RNA
ttttacactgcagtgacttggag

SEQ ID NO: 289 - RNA, 23 nt, synthetic construct
  source 1..23: mol_type = other RNA
ggaataatagtctttatcatcca

SEQ ID NO: 290 - RNA, 23 nt, synthetic construct
  source 1..23: mol_type = other RNA
aatcttatcaatgatgcaatcat

SEQ ID NO: 291 - RNA, 23 nt, synthetic construct
  source 1..23: mol_type = other RNA
ttcctttgtaaaatttcaccagc

SEQ ID NO: 292 - RNA, 23 nt, synthetic construct
  source 1..23: mol_type = other RNA
agttctttgatgtaatttgtcct

SEQ ID NO: 293 - RNA, 23 nt, synthetic construct
  source 1..23: mol_type = other RNA
ggagactggagattttacactgc

SEQ ID NO: 294 - RNA, 23 nt, synthetic construct
  source 1..23: mol_type = other RNA
ttagtagcagcaaaactttcatg

SEQ ID NO: 295 - RNA, 23 nt, synthetic construct
  source 1..23: mol_type = other RNA
gattccagctcagttttaatatc

SEQ ID NO: 296 - RNA, 23 nt, synthetic construct
  source 1..23: mol_type = other RNA
tctttatcatccataaaggaaaa

SEQ ID NO: 297 - RNA, 23 nt, synthetic construct
  source 1..23: mol_type = other RNA
ttgtttaatacccactgggaatc

SEQ ID NO: 298 - RNA, 23 nt, synthetic construct
  source 1..23: mol_type = other RNA
atgtactggatccagcagaggtg

SEQ ID NO: 299 - RNA, 23 nt, synthetic construct
  source 1..23: mol_type = other RNA
gtcagcatctcttacagaatcca

SEQ ID NO: 300 - RNA, 23 nt, synthetic construct
  source 1..23: mol_type = other RNA
tacgttgacaatctccatgtagt

SEQ ID NO: 301 - RNA, 23 nt, synthetic construct
  source 1..23: mol_type = other RNA
gagattttacactgcagtgactt

SEQ ID NO: 302 - RNA, 23 nt, synthetic construct
  source 1..23: mol_type = other RNA
tttgtaaaatttcaccagctgtt

SEQ ID NO: 303 - RNA, 23 nt, synthetic construct
  source 1..23: mol_type = other RNA
taatagtctttatcatccataaa

SEQ ID NO: 304 - RNA, 23 nt, synthetic construct
  source 1..23: mol_type = other RNA
acattctgataaatcttagctgg

SEQ ID NO: 305 - RNA, 23 nt, synthetic construct
  source 1..23: mol_type = other RNA
tacattttctggaatgtattcta

SEQ ID NO: 306 - RNA, 23 nt, synthetic construct
  source 1..23: mol_type = other RNA
aattctttcgtcgaatcttatca

SEQ ID NO: 307 - RNA, 23 nt, synthetic construct
  source 1..23: mol_type = other RNA
attgaggatttcatgctacttaa

SEQ ID NO: 308 - RNA, 23 nt, synthetic construct
  source 1..23: mol_type = other RNA
acaggaggaaaggaactcaggtg

SEQ ID NO: 309 - RNA, 23 nt, synthetic construct
  source 1..23: mol_type = other RNA
ttgaagaaaactttgcagctgcc

SEQ ID NO: 310 - RNA, 23 nt, synthetic construct
  source 1..23: mol_type = other RNA
gaaattgaggatttcatgctact

SEQ ID NO: 311 - RNA, 23 nt, synthetic construct
  source 1..23: mol_type = other RNA
tattttgctatttcctcctagac

SEQ ID NO: 312 - RNA, 23 nt, synthetic construct
  source 1..23: mol_type = other RNA
ttccagctcagttttaatatcag

SEQ ID NO: 313 - RNA, 23 nt, synthetic construct
  source 1..23: mol_type = other RNA
tttatgtactggacaatattaag

SEQ ID NO: 314 - RNA, 23 nt, synthetic construct
  source 1..23: mol_type = other RNA
tcaacattctgataaatcttagc

SEQ ID NO: 315 - RNA, 23 nt, synthetic construct
  source 1..23: mol_type = other RNA
atttcctttgtaaaatttcacca

SEQ ID NO: 316 - RNA, 23 nt, synthetic construct
  source 1..23: mol_type = other RNA
tgaggatttcatgctacttaacg

SEQ ID NO: 317 - RNA, 23 nt, synthetic construct
  source 1..23: mol_type = other RNA
agactggagattttacactgcag

SEQ ID NO: 318 - RNA, 23 nt, synthetic construct
  source 1..23: mol_type = other RNA
tagtagcagcaaaactttcatga

SEQ ID NO: 319 - RNA, 23 nt, synthetic construct
  source 1..23: mol_type = other RNA
attccagctcagttttaatatca

SEQ ID NO: 320 - RNA, 23 nt, synthetic construct
  source 1..23: mol_type = other RNA
aggatttcatgctacttaacgga

SEQ ID NO: 321 - RNA, 23 nt, synthetic construct
  source 1..23: mol_type = other RNA
gaagacatttctgaagtctgcaa

SEQ ID NO: 322 - RNA, 23 nt, synthetic construct
  source 1..23: mol_type = other RNA
tatgtactggacaatattaagct

SEQ ID NO: 323 - RNA, 23 nt, synthetic construct
  source 1..23: mol_type = other RNA
attctgataaatcttagctggac

SEQ ID NO: 324 - RNA, 23 nt, synthetic construct
  source 1..23: mol_type = other RNA
aacacttcgtaaagtagagcttg

SEQ ID NO: 325 - RNA, 23 nt, synthetic construct
  source 1..23: mol_type = other RNA
aacattctgataaatcttagctg

SEQ ID NO: 326 - RNA, 23 nt, synthetic construct
  source 1..23: mol_type = other RNA
attcttgctttattggtactgag

SEQ ID NO: 327 - RNA, 23 nt, synthetic construct
  source 1..23: mol_type = other RNA
acttaacggacttgagagaggag

SEQ ID NO: 328 - RNA, 23 nt, synthetic construct
  source 1..23: mol_type = other RNA
ttcgtaaagtagagcttgataca

SEQ ID NO: 329 - RNA, 23 nt, synthetic construct
  source 1..23: mol_type = other RNA
atttcaccagctgttcaacattc

SEQ ID NO: 330 - RNA, 23 nt, synthetic construct
  source 1..23: mol_type = other RNA
ttcaacattctgataaatcttag

SEQ ID NO: 331 - RNA, 23 nt, synthetic construct
  source 1..23: mol_type = other RNA
atccatatataaacccatggact

SEQ ID NO: 332 - RNA, 23 nt, synthetic construct
  source 1..23: mol_type = other RNA
gtaatttgtcctcatttcttcaa

SEQ ID NO: 333 - RNA, 23 nt, synthetic construct
  source 1..23: mol_type = other RNA
ttctttcgtcgaatcttatcaat

SEQ ID NO: 334 - RNA, 23 nt, synthetic construct
  source 1..23: mol_type = other RNA
agggaataatagtctttatcatc

SEQ ID NO: 335 - RNA, 23 nt, synthetic construct
  source 1..23: mol_type = other RNA
tataaacccatggactcagctac

SEQ ID NO: 336 - RNA, 23 nt, synthetic construct
  source 1..23: mol_type = other RNA
tctacttcctcagtcttaggaaa

SEQ ID NO: 337 - RNA, 23 nt, synthetic construct
  source 1..23: mol_type = other RNA
aaaggaactcaggtgttggaaag

SEQ ID NO: 338 - RNA, 23 nt, synthetic construct
  source 1..23: mol_type = other RNA
tttcgtcgaatcttatcaatgat

SEQ ID NO: 339 - RNA, 23 nt, synthetic construct
  source 1..23: mol_type = other RNA
tggaaattgaggatttcatgcta

SEQ ID NO: 340 - RNA, 23 nt, synthetic construct
  source 1..23: mol_type = other RNA
aagtagagcttgatacattttct

SEQ ID NO: 341 - RNA, 23 nt, synthetic construct
  source 1..23: mol_type = other RNA
ttggaattgtgcttagtagcagc

SEQ ID NO: 342 - RNA, 23 nt, synthetic construct
  source 1..23: mol_type = other RNA
tacagatagatcccacagtactg

SEQ ID NO: 343 - RNA, 23 nt, synthetic construct
  source 1..23: mol_type = other RNA
tttattttgctatttcctcctag

SEQ ID NO: 344 - RNA, 23 nt, synthetic construct
  source 1..23: mol_type = other RNA
tatcaatgatgcaatcatttctt

SEQ ID NO: 345 - RNA, 23 nt, synthetic construct
  source 1..23: mol_type = other RNA
attttacactgcagtgacttgga

SEQ ID NO: 346 - RNA, 23 nt, synthetic construct
  source 1..23: mol_type = other RNA
tctgataaatcttagctggactc

SEQ ID NO: 347 - RNA, 23 nt, synthetic construct
  source 1..23: mol_type = other RNA
tcgaatcttatcaatgatgcaat

SEQ ID NO: 348 - RNA, 23 nt, synthetic construct
  source 1..23: mol_type = other RNA
gaggatttcatgctacttaacgg

SEQ ID NO: 349 - RNA, 23 nt, synthetic construct
  source 1..23: mol_type = other RNA
gaaagcgtggatctgttattagt

SEQ ID NO: 350 - RNA, 23 nt, synthetic construct
  source 1..23: mol_type = other RNA
agtagagcttgatacattttctg

SEQ ID NO: 351 - RNA, 23 nt, synthetic construct
  source 1..23: mol_type = other RNA
aatccatatataaacccatggac

SEQ ID NO: 352 - RNA, 23 nt, synthetic construct
  source 1..23: mol_type = other RNA
aaagtagagcttgatacattttc

SEQ ID NO: 353 - RNA, 23 nt, synthetic construct
  source 1..23: mol_type = other RNA
gatttcatgctacttaacggact

SEQ ID NO: 354 - RNA, 23 nt, synthetic construct
  source 1..23: mol_type = other RNA
atagggaataatagtctttatca

SEQ ID NO: 355 - RNA, 23 nt, synthetic construct
  source 1..23: mol_type = other RNA
cttagtagcagcaaaactttcat

SEQ ID NO: 356 - RNA, 23 nt, synthetic construct
  source 1..23: mol_type = other RNA
ttaacggacttgagagaggagag

SEQ ID NO: 357 - RNA, 23 nt, synthetic construct
  source 1..23: mol_type = other RNA
gtagttattctcatcggtcctct

SEQ ID NO: 358 - RNA, 23 nt, synthetic construct
  source 1..23: mol_type = other RNA
caaaactttcatgatggtgtatt

SEQ ID NO: 359 - RNA, 23 nt, synthetic construct
  source 1..23: mol_type = other RNA
aatttgtcctcatttcttcaaat

SEQ ID NO: 360 - RNA, 23 nt, synthetic construct
  source 1..23: mol_type = other RNA
gaataatagtctttatcatccat

SEQ ID NO: 361 - RNA, 23 nt, synthetic construct
  source 1..23: mol_type = other RNA
ttagattccagctcagttttaat

SEQ ID NO: 362 - RNA, 23 nt, synthetic construct
  source 1..23: mol_type = other RNA
acaatctccatgtagttattctc

SEQ ID NO: 363 - RNA, 23 nt, synthetic construct
  source 1..23: mol_type = other RNA
aggaatagtcagcatctcttaca

SEQ ID NO: 364 - RNA, 23 nt, synthetic construct
  source 1..23: mol_type = other RNA
agcagcaaaactttcatgatggt

SEQ ID NO: 365 - RNA, 23 nt, synthetic construct
  source 1..23: mol_type = other RNA
atctggttctggttttatgtact

SEQ ID NO: 366 - RNA, 23 nt, synthetic construct
  source 1..23: mol_type = other RNA
aattgtgcttagtagcagcaaaa

SEQ ID NO: 367 - RNA, 23 nt, synthetic construct
  source 1..23: mol_type = other RNA
ttcaaaggtgagctgcagtcgaa

SEQ ID NO: 368 - RNA, 23 nt, synthetic construct
  source 1..23: mol_type = other RNA
tagattccagctcagttttaata

SEQ ID NO: 369 - RNA, 23 nt, synthetic construct
  source 1..23: mol_type = other RNA
gtgatttccatgactccactaaa

SEQ ID NO: 370 - RNA, 23 nt, synthetic construct
  source 1..23: mol_type = other RNA
gtgcttagtagcagcaaaacttt

SEQ ID NO: 371 - RNA, 23 nt, synthetic construct
  source 1..23: mol_type = other RNA
taatttgtcctcatttcttcaaa

SEQ ID NO: 372 - RNA, 23 nt, synthetic construct
  source 1..23: mol_type = other RNA
tttctttgctgcttccttgagta

SEQ ID NO: 373 - RNA, 23 nt, synthetic construct
  source 1..23: mol_type = other RNA
tctcttacagaatccatatataa

SEQ ID NO: 374 - RNA, 23 nt, synthetic construct
  source 1..23: mol_type = other RNA
attgttgggacacttagttacca

SEQ ID NO: 375 - RNA, 23 nt, synthetic construct
  source 1..23: mol_type = other RNA
acttcgtaaagtagagcttgata

SEQ ID NO: 376 - RNA, 23 nt, synthetic construct
  source 1..23: mol_type = other RNA
tagttattctcatcggtcctctc

SEQ ID NO: 377 - RNA, 23 nt, synthetic construct
  source 1..23: mol_type = other RNA
tagacatgagctgctaaaagctc

SEQ ID NO: 378 - RNA, 23 nt, synthetic construct
  source 1..23: mol_type = other RNA
agctgttcaacattctgataaat

SEQ ID NO: 379 - RNA, 23 nt, synthetic construct
  source 1..23: mol_type = other RNA
cgtaaagtagagcttgatacatt

SEQ ID NO: 380 - RNA, 23 nt, synthetic construct
  source 1..23: mol_type = other RNA
ttgagtactgttgtttggaatag

SEQ ID NO: 381 - RNA, 23 nt, synthetic construct
  source 1..23: mol_type = other RNA
tgatagggaataatagtctttat

SEQ ID NO: 382 - RNA, 23 nt, synthetic construct
  source 1..23: mol_type = other RNA
aaaccgaagatgtcatgttcaga

SEQ ID NO: 383 - RNA, 23 nt, synthetic construct
  source 1..23: mol_type = other RNA
aatttcaccagctgttcaacatt

SEQ ID NO: 384 - RNA, 23 nt, synthetic construct
  source 1..23: mol_type = other RNA
gggaataatagtctttatcatcc

SEQ ID NO: 385 - RNA, 23 nt, synthetic construct
  source 1..23: mol_type = other RNA
agcttgatacattttctggaatg

SEQ ID NO: 386 - RNA, 23 nt, synthetic construct
  source 1..23: mol_type = other RNA
ttgatgtaatttgtcctcatttc

SEQ ID NO: 387 - RNA, 23 nt, synthetic construct
  source 1..23: mol_type = other RNA
ttttgctatttcctcctagacat

SEQ ID NO: 388 - RNA, 23 nt, synthetic construct
  source 1..23: mol_type = other RNA
tgagtactgttgtttggaatagc

SEQ ID NO: 389 - RNA, 23 nt, synthetic construct
  source 1..23: mol_type = other RNA
tagtcagcatctcttacagaatc

SEQ ID NO: 390 - RNA, 23 nt, synthetic construct
  source 1..23: mol_type = other RNA
tattcttcaaaggtgagctgcag

SEQ ID NO: 391 - RNA, 23 nt, synthetic construct
  source 1..23: mol_type = other RNA
agagtcagacataaatgatctca

SEQ ID NO: 392 - RNA, 23 nt, synthetic construct
  source 1..23: mol_type = other RNA
aaccgaagatgtcatgttcagag

SEQ ID NO: 393 - RNA, 23 nt, synthetic construct
  source 1..23: mol_type = other RNA
atgctacttaacggacttgagag

SEQ ID NO: 394 - RNA, 23 nt, synthetic construct
  source 1..23: mol_type = other RNA
acagatagatcccacagtactgg

SEQ ID NO: 395 - RNA, 23 nt, synthetic construct
  source 1..23: mol_type = other RNA
acacttcgtaaagtagagcttga

SEQ ID NO: 396 - RNA, 23 nt, synthetic construct
  source 1..23: mol_type = other RNA
cttagattccagctcagttttaa

SEQ ID NO: 397 - RNA, 23 nt, synthetic construct
  source 1..23: mol_type = other RNA
gattcttgctttattggtactga

SEQ ID NO: 398 - RNA, 23 nt, synthetic construct
  source 1..23: mol_type = other RNA
ttttctggaatgtattctaagac

SEQ ID NO: 399 - RNA, 23 nt, synthetic construct
  source 1..23: mol_type = other RNA
ttatcaatgatgcaatcatttct

SEQ ID NO: 400 - RNA, 23 nt, synthetic construct
  source 1..23: mol_type = other RNA
tcctttgtaaaatttcaccagct

SEQ ID NO: 401 - RNA, 23 nt, synthetic construct
  source 1..23: mol_type = other RNA
tttgatgtaatttgtcctcattt

SEQ ID NO: 402 - RNA, 23 nt, synthetic construct
  source 1..23: mol_type = other RNA
gttgtttggaatagcaccggaaa

SEQ ID NO: 403 - RNA, 23 nt, synthetic construct
  source 1..23: mol_type = other RNA
tggaaacagagcaccttgagttg

SEQ ID NO: 404 - RNA, 23 nt, synthetic construct
  source 1..23: mol_type = other RNA
caatgatgcaatcatttcttcca

SEQ ID NO: 405 - RNA, 23 nt, synthetic construct
  source 1..23: mol_type = other RNA
aatgcttggttgattcttgcttt

SEQ ID NO: 406 - RNA, 23 nt, synthetic construct
  source 1..23: mol_type = other RNA
aaagttccttagattccagctca

SEQ ID NO: 407 - RNA, 23 nt, synthetic construct
  source 1..23: mol_type = other RNA
tgtactggacaatattaagctgg

SEQ ID NO: 408 - RNA, 23 nt, synthetic construct
  source 1..23: mol_type = other RNA
agaatccatatataaacccatgg

SEQ ID NO: 409 - RNA, 23 nt, synthetic construct
  source 1..23: mol_type = other RNA
ttttatgtactggacaatattaa

SEQ ID NO: 410 - RNA, 23 nt, synthetic construct
  source 1..23: mol_type = other RNA
ttgatacattttctggaatgtat

SEQ ID NO: 411 - RNA, 23 nt, synthetic construct
  source 1..23: mol_type = other RNA
aacggacttgagagaggagagcc

SEQ ID NO: 412 - RNA, 23 nt, synthetic construct
  source 1..23: mol_type = other RNA
tcctttggaattgtgcttagtag

SEQ ID NO: 413 - RNA, 23 nt, synthetic construct
  source 1..23: mol_type = other RNA
aagttccttagattccagctcag

SEQ ID NO: 414 - RNA, 23 nt, synthetic construct
  source 1..23: mol_type = other RNA
gattttacactgcagtgacttgg

SEQ ID NO: 415 - RNA, 23 nt, synthetic construct
  source 1..23: mol_type = other RNA
cttcgtaaagtagagcttgatac

SEQ ID NO: 416 - RNA, 23 nt, synthetic construct
  source 1..23: mol_type = other RNA
tactgttgtttggaatagcaccg

SEQ ID NO: 417 - RNA, 23 nt, synthetic construct
  source 1..23: mol_type = other RNA
gagtactgttgtttggaatagca

SEQ ID NO: 418 - RNA, 23 nt, synthetic construct
  source 1..23: mol_type = other RNA
gataaatcttagctggactcatg

SEQ ID NO: 419 - RNA, 23 nt, synthetic construct
  source 1..23: mol_type = other RNA
catttctgaagtctgcaagcagg

SEQ ID NO: 420 - RNA, 23 nt, synthetic construct
  source 1..23: mol_type = other RNA
tcgtaaagtagagcttgatacat

SEQ ID NO: 421 - RNA, 23 nt, synthetic construct
  source 1..23: mol_type = other RNA
ttcttgtttaatacccactggga

SEQ ID NO: 422 - RNA, 23 nt, synthetic construct
  source 1..23: mol_type = other RNA
attcattccagcttgaagacatt

SEQ ID NO: 423 - RNA, 23 nt, synthetic construct
  source 1..23: mol_type = other RNA
aattgaggatttcatgctactta

SEQ ID NO: 424 - RNA, 23 nt, synthetic construct
  source 1..23: mol_type = other RNA
tgagcaccaatcctgtagtggaa

SEQ ID NO: 425 - RNA, 23 nt, synthetic construct
  source 1..23: mol_type = other RNA
gaattgttgggacacttagttac

SEQ ID NO: 426 - RNA, 23 nt, synthetic construct
  source 1..23: mol_type = other RNA
atcaatgatgcaatcatttcttc

SEQ ID NO: 427 - RNA, 23 nt, synthetic construct
  source 1..23: mol_type = other RNA
agtcagacataaatgatctcaag

SEQ ID NO: 428 - RNA, 23 nt, synthetic construct
  source 1..23: mol_type = other RNA
gttttatgtactggacaatatta

SEQ ID NO: 429 - RNA, 23 nt, synthetic construct
  source 1..23: mol_type = other RNA
aatcttagctggactcatgcttc

SEQ ID NO: 430 - RNA, 23 nt, synthetic construct
  source 1..23: mol_type = other RNA
atttgtcctcatttcttcaaatg

SEQ ID NO: 431 - RNA, 23 nt, synthetic construct
  source 1..23: mol_type = other RNA
tttacactgcagtgacttggagg

SEQ ID NO: 432 - RNA, 23 nt, synthetic construct
  source 1..23: mol_type = other RNA
tcttgctttattggtactgagaa

SEQ ID NO: 433 - RNA, 23 nt, synthetic construct
  source 1..23: mol_type = other RNA
catgtagttattctcatcggtcc

SEQ ID NO: 434 - RNA, 23 nt, synthetic construct
  source 1..23: mol_type = other RNA
attgtttacagggctacagatag

SEQ ID NO: 435 - RNA, 23 nt, synthetic construct
  source 1..23: mol_type = other RNA
ggaaattgaggatttcatgctac

SEQ ID NO: 436 - RNA, 23 nt, synthetic construct
  source 1..23: mol_type = other RNA
gtactgttgtttggaatagcacc

SEQ ID NO: 437 - RNA, 23 nt, synthetic construct
  source 1..23: mol_type = other RNA
actggagattttacactgcagtg

SEQ ID NO: 438 - RNA, 23 nt, synthetic construct
  source 1..23: mol_type = other RNA
ctgatagggaataatagtcttta

SEQ ID NO: 439 - RNA, 23 nt, synthetic construct
  source 1..23: mol_type = other RNA
gaattgtgcttagtagcagcaaa

SEQ ID NO: 440 - RNA, 23 nt, synthetic construct
  source 1..23: mol_type = other RNA
aggaaaggaactcaggtgttgga

SEQ ID NO: 441 - RNA, 23 nt, synthetic construct
  source 1..23: mol_type = other RNA
gaatagtcagcatctcttacaga

SEQ ID NO: 442 - RNA, 23 nt, synthetic construct
  source 1..23: mol_type = other RNA
tttacagggctacagatagatcc

SEQ ID NO: 443 - RNA, 23 nt, synthetic construct
  source 1..23: mol_type = other RNA
acatttctgaagtctgcaagcag

SEQ ID NO: 444 - RNA, 23 nt, synthetic construct
  source 1..23: mol_type = other RNA
atttccatgactccactaaagta

SEQ ID NO: 445 - RNA, 23 nt, synthetic construct
  source 1..23: mol_type = other RNA
ctttgatgtaatttgtcctcatt

SEQ ID NO: 446 - RNA, 23 nt, synthetic construct
  source 1..23: mol_type = other RNA
ttgtttggaatagcaccggaaac

SEQ ID NO: 447 - RNA, 21 nt, synthetic construct
  source 1..21: mol_type = other RNA
atggatgataaagactattat

SEQ ID NO: 448 - RNA, 21 nt, synthetic construct
  source 1..21: mol_type = other RNA
tggatgataaagactattatt

SEQ ID NO: 449 - RNA, 21 nt, synthetic construct
  source 1..21: mol_type = other RNA
tttatggatgataaagactat

SEQ ID NO: 450 - RNA, 21 nt, synthetic construct
  source 1..21: mol_type = other RNA
atacaccatcatgaaagtttt

SEQ ID NO: 451 - RNA, 21 nt, synthetic construct
  source 1..21: mol_type = other RNA
gctctactttacgaagtgttt

SEQ ID NO: 452 - RNA, 21 nt, synthetic construct
  source 1..21: mol_type = other RNA
ctctactttacgaagtgtttc

SEQ ID NO: 453 - RNA, 21 nt, synthetic construct
  source 1..21: mol_type = other RNA
ttatatatggattctgtaaga

SEQ ID NO: 454 - RNA, 21 nt, synthetic construct
  source 1..21: mol_type = other RNA
tgaacagctggtgaaatttta

SEQ ID NO: 455 - RNA, 21 nt, synthetic construct
  source 1..21: mol_type = other RNA
ctctctcaagtccgttaagta

SEQ ID NO: 456 - RNA, 21 nt, synthetic construct
  source 1..21: mol_type = other RNA
gaacagctggtgaaattttac

SEQ ID NO: 457 - RNA, 21 nt, synthetic construct
  source 1..21: mol_type = other RNA
tatatggattctgtaagagat

SEQ ID NO: 458 - RNA, 21 nt, synthetic construct
  source 1..21: mol_type = other RNA
atgtatcaagctctactttac

SEQ ID NO: 459 - RNA, 21 nt, synthetic construct
  source 1..21: mol_type = other RNA
cactgcagtgtaaaatctcca

SEQ ID NO: 460 - RNA, 21 nt, synthetic construct
  source 1..21: mol_type = other RNA
ggaggaaatagcaaaataaat

SEQ ID NO: 461 - RNA, 21 nt, synthetic construct
  source 1..21: mol_type = other RNA
ggaagaaatgattgcatcatt

SEQ ID NO: 462 - RNA, 21 nt, synthetic construct
  source 1..21: mol_type = other RNA
cagtgtaaaatctccagtctc

SEQ ID NO: 463 - RNA, 21 nt, synthetic construct
  source 1..21: mol_type = other RNA
tgcagacttcagaaatgtctt

SEQ ID NO: 464 - RNA, 21 nt, synthetic construct
  source 1..21: mol_type = other RNA
gtgtaaaatctccagtctcca

SEQ ID NO: 465 - RNA, 21 nt, synthetic construct
  source 1..21: mol_type = other RNA
gctgcaaagttttcttcaaaa

SEQ ID NO: 466 - RNA, 21 nt, synthetic construct
  source 1..21: mol_type = other RNA
agctgcaaagttttcttcaaa

SEQ ID NO: 467 - RNA, 21 nt, synthetic construct
  source 1..21: mol_type = other RNA
gataaagactattattcccta

SEQ ID NO: 468 - RNA, 21 nt, synthetic construct
  source 1..21: mol_type = other RNA
cagaaaatgtatcaagctcta

SEQ ID NO: 469 - RNA, 21 nt, synthetic construct
  source 1..21: mol_type = other RNA
ttctcagtaccaataaagcaa

SEQ ID NO: 470 - RNA, 21 nt, synthetic construct
  source 1..21: mol_type = other RNA
gataagattcgacgaaagaat

SEQ ID NO: 471 - RNA, 21 nt, synthetic construct
  source 1..21: mol_type = other RNA
ggtttatatatggattctgta

SEQ ID NO: 472 - RNA, 21 nt, synthetic construct
  source 1..21: mol_type = other RNA
gctactaagcacaattccaaa

SEQ ID NO: 473 - RNA, 21 nt, synthetic construct
  source 1..21: mol_type = other RNA
ctccaagtcactgcagtgtaa

SEQ ID NO: 474 - RNA, 21 nt, synthetic construct
  source 1..21: mol_type = other RNA
ttgaacagctggtgaaatttt

SEQ ID NO: 475 - RNA, 21 nt, synthetic construct
  source 1..21: mol_type = other RNA
catgaaagttttgctgctact

SEQ ID NO: 476 - RNA, 21 nt, synthetic construct
  source 1..21: mol_type = other RNA
ccagaaaatgtatcaagctct

SEQ ID NO: 477 - RNA, 21 nt, synthetic construct
  source 1..21: mol_type = other RNA
agtcactgcagtgtaaaatct

SEQ ID NO: 478 - RNA, 21 nt, synthetic construct
  source 1..21: mol_type = other RNA
ttagaatacattccagaaaat

SEQ ID NO: 479 - RNA, 21 nt, synthetic construct
  source 1..21: mol_type = other RNA
tgagtccatgggtttatatat

SEQ ID NO: 480 - RNA, 21 nt, synthetic construct
  source 1..21: mol_type = other RNA
atcggctagagaccaatcttt

SEQ ID NO: 481 - RNA, 21 nt, synthetic construct
  source 1..21: mol_type = other RNA
tcctttatggatgataaagac

SEQ ID NO: 482 - RNA, 21 nt, synthetic construct
  source 1..21: mol_type = other RNA
gttgaacagctggtgaaattt

SEQ ID NO: 483 - RNA, 21 nt, synthetic construct
  source 1..21: mol_type = other RNA
aatgtatcaagctctacttta

SEQ ID NO: 484 - RNA, 21 nt, synthetic construct
  source 1..21: mol_type = other RNA
ttatggatgataaagactatt

SEQ ID NO: 485 - RNA, 21 nt, synthetic construct
  source 1..21: mol_type = other RNA
gaggaaatagcaaaataaatt

SEQ ID NO: 486 - RNA, 21 nt, synthetic construct
  source 1..21: mol_type = other RNA
tgattgcatcattgataagat

SEQ ID NO: 487 - RNA, 21 nt, synthetic construct
  source 1..21: mol_type = other RNA
tcatgaaagttttgctgctac

SEQ ID NO: 488 - RNA, 21 nt, synthetic construct
  source 1..21: mol_type = other RNA
tatgtgctggaagaaatgatt

SEQ ID NO: 489 - RNA, 21 nt, synthetic construct
  source 1..21: mol_type = other RNA
agagatgctgactattcctat

SEQ ID NO: 490 - RNA, 21 nt, synthetic construct
  source 1..21: mol_type = other RNA
tgctggaattctgcttctaca

SEQ ID NO: 491 - RNA, 21 nt, synthetic construct
  source 1..21: mol_type = other RNA
gtaagagatgctgactattcc

SEQ ID NO: 492 - RNA, 21 nt, synthetic construct
  source 1..21: mol_type = other RNA
taggaggaaatagcaaaataa

SEQ ID NO: 493 - RNA, 21 nt, synthetic construct
  source 1..21: mol_type = other RNA
caccatcatgaaagttttgct

SEQ ID NO: 494 - RNA, 21 nt, synthetic construct
  source 1..21: mol_type = other RNA
tatccggtcttagaatacatt

SEQ ID NO: 495 - RNA, 21 nt, synthetic construct
  source 1..21: mol_type = other RNA
gtccgttaagtagcatgaaat

SEQ ID NO: 496 - RNA, 21 nt, synthetic construct
  source 1..21: mol_type = other RNA
tcactgcagtgtaaaatctcc

SEQ ID NO: 497 - RNA, 21 nt, synthetic construct
  source 1..21: mol_type = other RNA
ctgtaagagatgctgactatt

SEQ ID NO: 498 - RNA, 21 nt, synthetic construct
  source 1..21: mol_type = other RNA
ctttatggatgataaagacta

SEQ ID NO: 499 - RNA, 21 nt, synthetic construct
  source 1..21: mol_type = other RNA
gggtttatatatggattctgt

SEQ ID NO: 500 - RNA, 21 nt, synthetic construct
  source 1..21: mol_type = other RNA
tctcaagtccgttaagtagca

SEQ ID NO: 501 - RNA, 21 nt, synthetic construct
  source 1..21: mol_type = other RNA
ccctctgaacatgacatcttc

SEQ ID NO: 502 - RNA, 21 nt, synthetic construct
  source 1..21: mol_type = other RNA
aaggaactttcagcaactgta

SEQ ID NO: 503 - RNA, 21 nt, synthetic construct
  source 1..21: mol_type = other RNA
tctgtaagagatgctgactat

SEQ ID NO: 504 - RNA, 21 nt, synthetic construct
  source 1..21: mol_type = other RNA
ggtgaaattttacaaaggaaa

SEQ ID NO: 505 - RNA, 21 nt, synthetic construct
  source 1..21: mol_type = other RNA
tctaaggaactttcagcaact

SEQ ID NO: 506 - RNA, 21 nt, synthetic construct
  source 1..21: mol_type = other RNA
agaaatgaggacaaattacat

SEQ ID NO: 507 - RNA, 21 nt, synthetic construct
  source 1..21: mol_type = other RNA
taccaataaagcaagaatcaa

SEQ ID NO: 508 - RNA, 21 nt, synthetic construct
  source 1..21: mol_type = other RNA
gtcttcaagctggaatgaatt

SEQ ID NO: 509 - RNA, 21 nt, synthetic construct
  source 1..21: mol_type = other RNA
gcttaatattgtccagtacat

SEQ ID NO: 510 - RNA, 21 nt, synthetic construct
  source 1..21: mol_type = other RNA
gtttatatatggattctgtaa

SEQ ID NO: 511 - RNA, 21 nt, synthetic construct
  source 1..21: mol_type = other RNA
ccaagtcactgcagtgtaaaa

SEQ ID NO: 512 - RNA, 21 nt, synthetic construct
  source 1..21: mol_type = other RNA
gatgataaagactattattcc

SEQ ID NO: 513 - RNA, 21 nt, synthetic construct
  source 1..21: mol_type = other RNA
gattgcatcattgataagatt

SEQ ID NO: 514 - RNA, 21 nt, synthetic construct
  source 1..21: mol_type = other RNA
tggtgaaattttacaaaggaa

SEQ ID NO: 515 - RNA, 21 nt, synthetic construct
  source 1..21: mol_type = other RNA
gacaaattacatcaaagaact

SEQ ID NO: 516 - RNA, 21 nt, synthetic construct
  source 1..21: mol_type = other RNA
agtgtaaaatctccagtctcc

SEQ ID NO: 517 - RNA, 21 nt, synthetic construct
  source 1..21: mol_type = other RNA
tgaaagttttgctgctactaa

SEQ ID NO: 518 - RNA, 21 nt, synthetic construct
  source 1..21: mol_type = other RNA
tattaaaactgagctggaatc

SEQ ID NO: 519 - RNA, 21 nt, synthetic construct
  source 1..21: mol_type = other RNA
ttcctttatggatgataaaga

SEQ ID NO: 520 - RNA, 21 nt, synthetic construct
  source 1..21: mol_type = other RNA
ttcccagtgggtattaaacaa

SEQ ID NO: 521 - RNA, 21 nt, synthetic construct
  source 1..21: mol_type = other RNA
cctctgctggatccagtacat

SEQ ID NO: 522 - RNA, 21 nt, synthetic construct
  source 1..21: mol_type = other RNA
gattctgtaagagatgctgac

SEQ ID NO: 523 - RNA, 21 nt, synthetic construct
  source 1..21: mol_type = other RNA
tacatggagattgtcaacgta

SEQ ID NO: 524 - RNA, 21 nt, synthetic construct
  source 1..21: mol_type = other RNA
gtcactgcagtgtaaaatctc

SEQ ID NO: 525 - RNA, 21 nt, synthetic construct
  source 1..21: mol_type = other RNA
cagctggtgaaattttacaaa

SEQ ID NO: 526 - RNA, 21 nt, synthetic construct
  source 1..21: mol_type = other RNA
tatggatgataaagactatta

SEQ ID NO: 527 - RNA, 21 nt, synthetic construct
  source 1..21: mol_type = other RNA
agctaagatttatcagaatgt

SEQ ID NO: 528 - RNA, 21 nt, synthetic construct
  source 1..21: mol_type = other RNA
gaatacattccagaaaatgta

SEQ ID NO: 529 - RNA, 21 nt, synthetic construct
  source 1..21: mol_type = other RNA
ataagattcgacgaaagaatt

SEQ ID NO: 530 - RNA, 21 nt, synthetic construct
  source 1..21: mol_type = other RNA
aagtagcatgaaatcctcaat

SEQ ID NO: 531 - RNA, 21 nt, synthetic construct
  source 1..21: mol_type = other RNA
cctgagttcctttcctcctgt

SEQ ID NO: 532 - RNA, 21 nt, synthetic construct
  source 1..21: mol_type = other RNA
cagctgcaaagttttcttcaa

SEQ ID NO: 533 - RNA, 21 nt, synthetic construct
  source 1..21: mol_type = other RNA
tagcatgaaatcctcaatttc

SEQ ID NO: 534 - RNA, 21 nt, synthetic construct
  source 1..21: mol_type = other RNA
ctaggaggaaatagcaaaata

SEQ ID NO: 535 - RNA, 21 nt, synthetic construct
  source 1..21: mol_type = other RNA
gatattaaaactgagctggaa

SEQ ID NO: 536 - RNA, 21 nt, synthetic construct
  source 1..21: mol_type = other RNA
taatattgtccagtacataaa

SEQ ID NO: 537 - RNA, 21 nt, synthetic construct
  source 1..21: mol_type = other RNA
taagatttatcagaatgttga

SEQ ID NO: 538 - RNA, 21 nt, synthetic construct
  source 1..21: mol_type = other RNA
gtgaaattttacaaaggaaat

SEQ ID NO: 539 - RNA, 21 nt, synthetic construct
  source 1..21: mol_type = other RNA
ttaagtagcatgaaatcctca

SEQ ID NO: 540 - RNA, 21 nt, synthetic construct
  source 1..21: mol_type = other RNA
gcagtgtaaaatctccagtct

SEQ ID NO: 541 - RNA, 21 nt, synthetic construct
  source 1..21: mol_type = other RNA
atgaaagttttgctgctacta

SEQ ID NO: 542 - RNA, 21 nt, synthetic construct
  source 1..21: mol_type = other RNA
atattaaaactgagctggaat

SEQ ID NO: 543 - RNA, 21 nt, synthetic construct
  source 1..21: mol_type = other RNA
cgttaagtagcatgaaatcct

SEQ ID NO: 544 - RNA, 21 nt, synthetic construct
  source 1..21: mol_type = other RNA
gcagacttcagaaatgtcttc

SEQ ID NO: 545 - RNA, 21 nt, synthetic construct
  source 1..21: mol_type = other RNA
cttaatattgtccagtacata

SEQ ID NO: 546 - RNA, 21 nt, synthetic construct
  source 1..21: mol_type = other RNA
ccagctaagatttatcagaat

SEQ ID NO: 547 - RNA, 21 nt, synthetic construct
  source 1..21: mol_type = other RNA
agctctactttacgaagtgtt

SEQ ID NO: 548 - RNA, 21 nt, synthetic construct
  source 1..21: mol_type = other RNA
gctaagatttatcagaatgtt

SEQ ID NO: 549 - RNA, 21 nt, synthetic construct
  source 1..21: mol_type = other RNA
cagtaccaataaagcaagaat

SEQ ID NO: 550 - RNA, 21 nt, synthetic construct
  source 1..21: mol_type = other RNA
cctctctcaagtccgttaagt

SEQ ID NO: 551 - RNA, 21 nt, synthetic construct
  source 1..21: mol_type = other RNA
tatcaagctctactttacgaa

SEQ ID NO: 552 - RNA, 21 nt, synthetic construct
  source 1..21: mol_type = other RNA
atgttgaacagctggtgaaat

SEQ ID NO: 553 - RNA, 21 nt, synthetic construct
  source 1..21: mol_type = other RNA
aagatttatcagaatgttgaa

SEQ ID NO: 554 - RNA, 21 nt, synthetic construct
  source 1..21: mol_type = other RNA
tccatgggtttatatatggat

SEQ ID NO: 555 - RNA, 21 nt, synthetic construct
  source 1..21: mol_type = other RNA
gaagaaatgaggacaaattac

SEQ ID NO: 556 - RNA, 21 nt, synthetic construct
  source 1..21: mol_type = other RNA
tgataagattcgacgaaagaa

SEQ ID NO: 557 - RNA, 21 nt, synthetic construct
  source 1..21: mol_type = other RNA
tgataaagactattattccct

SEQ ID NO: 558 - RNA, 21 nt, synthetic construct
  source 1..21: mol_type = other RNA
agctgagtccatgggtttata

SEQ ID NO: 559 - RNA, 21 nt, synthetic construct
  source 1..21: mol_type = other RNA
tcctaagactgaggaagtaga

SEQ ID NO: 560 - RNA, 21 nt, synthetic construct
  source 1..21: mol_type = other RNA
ttccaacacctgagttccttt

SEQ ID NO: 561 - RNA, 21 nt, synthetic construct
  source 1..21: mol_type = other RNA
cattgataagattcgacgaaa

SEQ ID NO: 562 - RNA, 21 nt, synthetic construct
  source 1..21: mol_type = other RNA
gcatgaaatcctcaatttcca

SEQ ID NO: 563 - RNA, 21 nt, synthetic construct
  source 1..21: mol_type = other RNA
aaaatgtatcaagctctactt

SEQ ID NO: 564 - RNA, 21 nt, synthetic construct
  source 1..21: mol_type = other RNA
tgctactaagcacaattccaa

SEQ ID NO: 565 - RNA, 21 nt, synthetic construct
  source 1..21: mol_type = other RNA
gtactgtgggatctatctgta

SEQ ID NO: 566 - RNA, 21 nt, synthetic construct
  source 1..21: mol_type = other RNA
aggaggaaatagcaaaataaa

SEQ ID NO: 567 - RNA, 21 nt, synthetic construct
  source 1..21: mol_type = other RNA
gaaatgattgcatcattgata

SEQ ID NO: 568 - RNA, 21 nt, synthetic construct
  source 1..21: mol_type = other RNA
caagtcactgcagtgtaaaat

SEQ ID NO: 569 - RNA, 21 nt, synthetic construct
  source 1..21: mol_type = other RNA
gtccagctaagatttatcaga

SEQ ID NO: 570 - RNA, 21 nt, synthetic construct
  source 1..21: mol_type = other RNA
tgcatcattgataagattcga

SEQ ID NO: 571 - RNA, 21 nt, synthetic construct
  source 1..21: mol_type = other RNA
gttaagtagcatgaaatcctc

SEQ ID NO: 572 - RNA, 21 nt, synthetic construct
  source 1..21: mol_type = other RNA
taataacagatccacgctttc

SEQ ID NO: 573 - RNA, 21 nt, synthetic construct
  source 1..21: mol_type = other RNA
gaaaatgtatcaagctctact

SEQ ID NO: 574 - RNA, 21 nt, synthetic construct
  source 1..21: mol_type = other RNA
ccatgggtttatatatggatt

SEQ ID NO: 575 - RNA, 21 nt, synthetic construct
  source 1..21: mol_type = other RNA
aaatgtatcaagctctacttt

SEQ ID NO: 576 - RNA, 21 nt, synthetic construct
  source 1..21: mol_type = other RNA
tccgttaagtagcatgaaatc

SEQ ID NO: 577 - RNA, 21 nt, synthetic construct
  source 1..21: mol_type = other RNA
ataaagactattattccctat

SEQ ID NO: 578 - RNA, 21 nt, synthetic construct
  source 1..21: mol_type = other RNA
gaaagttttgctgctactaag

SEQ ID NO: 579 - RNA, 21 nt, synthetic construct
  source 1..21: mol_type = other RNA
ctcctctctcaagtccgttaa

SEQ ID NO: 580 - RNA, 21 nt, synthetic construct
  source 1..21: mol_type = other RNA
aggaccgatgagaataactac

SEQ ID NO: 581 - RNA, 21 nt, synthetic construct
  source 1..21: mol_type = other RNA
tacaccatcatgaaagttttg

SEQ ID NO: 582 - RNA, 21 nt, synthetic construct
  source 1..21: mol_type = other RNA
ttgaagaaatgaggacaaatt

SEQ ID NO: 583 - RNA, 21 nt, synthetic construct
  source 1..21: mol_type = other RNA
ggatgataaagactattattc

SEQ ID NO: 584 - RNA, 21 nt, synthetic construct
  source 1..21: mol_type = other RNA
taaaactgagctggaatctaa

SEQ ID NO: 585 - RNA, 21 nt, synthetic construct
  source 1..21: mol_type = other RNA
gaataactacatggagattgt

SEQ ID NO: 586 - RNA, 21 nt, synthetic construct
  source 1..21: mol_type = other RNA
taagagatgctgactattcct

SEQ ID NO: 587 - RNA, 21 nt, synthetic construct
  source 1..21: mol_type = other RNA
catcatgaaagttttgctgct

SEQ ID NO: 588 - RNA, 21 nt, synthetic construct
  source 1..21: mol_type = other RNA
tacataaaaccagaaccagat

SEQ ID NO: 589 - RNA, 21 nt, synthetic construct
  source 1..21: mol_type = other RNA
ttgctgctactaagcacaatt

SEQ ID NO: 590 - RNA, 21 nt, synthetic construct
  source 1..21: mol_type = other RNA
cgactgcagctcacctttgaa

SEQ ID NO: 591 - RNA, 21 nt, synthetic construct
  source 1..21: mol_type = other RNA
ttaaaactgagctggaatcta

SEQ ID NO: 592 - RNA, 21 nt, synthetic construct
  source 1..21: mol_type = other RNA
tagtggagtcatggaaatcac

SEQ ID NO: 593 - RNA, 21 nt, synthetic construct
  source 1..21: mol_type = other RNA
agttttgctgctactaagcac

SEQ ID NO: 594 - RNA, 21 nt, synthetic construct
  source 1..21: mol_type = other RNA
tgaagaaatgaggacaaatta

SEQ ID NO: 595 - RNA, 21 nt, synthetic construct
  source 1..21: mol_type = other RNA
ctcaaggaagcagcaaagaaa

SEQ ID NO: 596 - RNA, 21 nt, synthetic construct
  source 1..21: mol_type = other RNA
atatatggattctgtaagaga

SEQ ID NO: 597 - RNA, 21 nt, synthetic construct
  source 1..21: mol_type = other RNA
gtaactaagtgtcccaacaat

SEQ ID NO: 598 - RNA, 21 nt, synthetic construct
  source 1..21: mol_type = other RNA
tcaagctctactttacgaagt

SEQ ID NO: 599 - RNA, 21 nt, synthetic construct
  source 1..21: mol_type = other RNA
gaggaccgatgagaataacta

SEQ ID NO: 600 - RNA, 21 nt, synthetic construct
  source 1..21: mol_type = other RNA
gcttttagcagctcatgtcta

SEQ ID NO: 601 - RNA, 21 nt, synthetic construct
  source 1..21: mol_type = other RNA
ttatcagaatgttgaacagct

SEQ ID NO: 602 - RNA, 21 nt, synthetic construct
  source 1..21: mol_type = other RNA
tgtatcaagctctactttacg

SEQ ID NO: 603 - RNA, 21 nt, synthetic construct
  source 1..21: mol_type = other RNA
attccaaacaacagtactcaa

SEQ ID NO: 604 - RNA, 21 nt, synthetic construct
  source 1..21: mol_type = other RNA
aaagactattattccctatca

SEQ ID NO: 605 - RNA, 21 nt, synthetic construct
  source 1..21: mol_type = other RNA
tgaacatgacatcttcggttt

SEQ ID NO: 606 - RNA, 21 nt, synthetic construct
  source 1..21: mol_type = other RNA
tgttgaacagctggtgaaatt

SEQ ID NO: 607 - RNA, 21 nt, synthetic construct
  source 1..21: mol_type = other RNA
atgataaagactattattccc

SEQ ID NO: 608 - RNA, 21 nt, synthetic construct
  source 1..21: mol_type = other RNA
ttccagaaaatgtatcaagct

SEQ ID NO: 609 - RNA, 21 nt, synthetic construct
  source 1..21: mol_type = other RNA
aatgaggacaaattacatcaa

SEQ ID NO: 610 - RNA, 21 nt, synthetic construct
  source 1..21: mol_type = other RNA
gtctaggaggaaatagcaaaa

SEQ ID NO: 611 - RNA, 21 nt, synthetic construct
  source 1..21: mol_type = other RNA
tattccaaacaacagtactca

SEQ ID NO: 612 - RNA, 21 nt, synthetic construct
  source 1..21: mol_type = other RNA
ttctgtaagagatgctgacta

SEQ ID NO: 613 - RNA, 21 nt, synthetic construct
  source 1..21: mol_type = other RNA
gcagctcacctttgaagaata

SEQ ID NO: 614 - RNA, 21 nt, synthetic construct
  source 1..21: mol_type = other RNA
agatcatttatgtctgactct

SEQ ID NO: 615 - RNA, 21 nt, synthetic construct
  source 1..21: mol_type = other RNA
ctgaacatgacatcttcggtt

SEQ ID NO: 616 - RNA, 21 nt, synthetic construct
  source 1..21: mol_type = other RNA
ctcaagtccgttaagtagcat

SEQ ID NO: 617 - RNA, 21 nt, synthetic construct
  source 1..21: mol_type = other RNA
agtactgtgggatctatctgt

SEQ ID NO: 618 - RNA, 21 nt, synthetic construct
  source 1..21: mol_type = other RNA
aagctctactttacgaagtgt

SEQ ID NO: 619 - RNA, 21 nt, synthetic construct
  source 1..21: mol_type = other RNA
aaaactgagctggaatctaag

SEQ ID NO: 620 - RNA, 21 nt, synthetic construct
  source 1..21: mol_type = other RNA
agtaccaataaagcaagaatc

SEQ ID NO: 621 - RNA, 21 nt, synthetic construct
  source 1..21: mol_type = other RNA
cttagaatacattccagaaaa

SEQ ID NO: 622 - RNA, 21 nt, synthetic construct
  source 1..21: mol_type = other RNA
aaatgattgcatcattgataa

SEQ ID NO: 623 - RNA, 21 nt, synthetic construct
  source 1..21: mol_type = other RNA
ctggtgaaattttacaaagga

SEQ ID NO: 624 - RNA, 21 nt, synthetic construct
  source 1..21: mol_type = other RNA
atgaggacaaattacatcaaa

SEQ ID NO: 625 - RNA, 21 nt, synthetic construct
  source 1..21: mol_type = other RNA
tccggtgctattccaaacaac

SEQ ID NO: 626 - RNA, 21 nt, synthetic construct
  source 1..21: mol_type = other RNA
actcaaggtgctctgtttcca

SEQ ID NO: 627 - RNA, 21 nt, synthetic construct
  source 1..21: mol_type = other RNA
gaagaaatgattgcatcattg

SEQ ID NO: 628 - RNA, 21 nt, synthetic construct
  source 1..21: mol_type = other RNA
agcaagaatcaaccaagcatt

SEQ ID NO: 629 - RNA, 21 nt, synthetic construct
  source 1..21: mol_type = other RNA
agctggaatctaaggaacttt

SEQ ID NO: 630 - RNA, 21 nt, synthetic construct
  source 1..21: mol_type = other RNA
agcttaatattgtccagtaca

SEQ ID NO: 631 - RNA, 21 nt, synthetic construct
  source 1..21: mol_type = other RNA
atgggtttatatatggattct

SEQ ID NO: 632 - RNA, 21 nt, synthetic construct
  source 1..21: mol_type = other RNA
aatattgtccagtacataaaa

SEQ ID NO: 633 - RNA, 21 nt, synthetic construct
  source 1..21: mol_type = other RNA
acattccagaaaatgtatcaa

SEQ ID NO: 634 - RNA, 21 nt, synthetic construct
  source 1..21: mol_type = other RNA
ctctcctctctcaagtccgtt

SEQ ID NO: 635 - RNA, 21 nt, synthetic construct
  source 1..21: mol_type = other RNA
actaagcacaattccaaagga

SEQ ID NO: 636 - RNA, 21 nt, synthetic construct
  source 1..21: mol_type = other RNA
gagctggaatctaaggaactt

SEQ ID NO: 637 - RNA, 21 nt, synthetic construct
  source 1..21: mol_type = other RNA
aagtcactgcagtgtaaaatc

SEQ ID NO: 638 - RNA, 21 nt, synthetic construct
  source 1..21: mol_type = other RNA
atcaagctctactttacgaag

SEQ ID NO: 639 - RNA, 21 nt, synthetic construct
  source 1..21: mol_type = other RNA
gtgctattccaaacaacagta

SEQ ID NO: 640 - RNA, 21 nt, synthetic construct
  source 1..21: mol_type = other RNA
ctattccaaacaacagtactc

SEQ ID NO: 641 - RNA, 21 nt, synthetic construct
  source 1..21: mol_type = other RNA
tgagtccagctaagatttatc

SEQ ID NO: 642 - RNA, 21 nt, synthetic construct
  source 1..21: mol_type = other RNA
tgcttgcagacttcagaaatg

SEQ ID NO: 643 - RNA, 21 nt, synthetic construct
  source 1..21: mol_type = other RNA
gtatcaagctctactttacga

SEQ ID NO: 644 - RNA, 21 nt, synthetic construct
  source 1..21: mol_type = other RNA
ccagtgggtattaaacaagaa

SEQ ID NO: 645 - RNA, 21 nt, synthetic construct
  source 1..21: mol_type = other RNA
tgtcttcaagctggaatgaat

SEQ ID NO: 646 - RNA, 21 nt, synthetic construct
  source 1..21: mol_type = other RNA
agtagcatgaaatcctcaatt

SEQ ID NO: 647 - RNA, 21 nt, synthetic construct
  source 1..21: mol_type = other RNA
ccactacaggattggtgctca

SEQ ID NO: 648 - RNA, 21 nt, synthetic construct
  source 1..21: mol_type = other RNA
aactaagtgtcccaacaattc

SEQ ID NO: 649 - RNA, 21 nt, synthetic construct
  source 1..21: mol_type = other RNA
agaaatgattgcatcattgat

SEQ ID NO: 650 - RNA, 21 nt, synthetic construct
  source 1..21: mol_type = other RNA
tgagatcatttatgtctgact

SEQ ID NO: 651 - RNA, 21 nt, synthetic construct
  source 1..21: mol_type = other RNA
atattgtccagtacataaaac

SEQ ID NO: 652 - RNA, 21 nt, synthetic construct
  source 1..21: mol_type = other RNA
agcatgagtccagctaagatt

SEQ ID NO: 653 - RNA, 21 nt, synthetic construct
  source 1..21: mol_type = other RNA
tttgaagaaatgaggacaaat

SEQ ID NO: 654 - RNA, 21 nt, synthetic construct
  source 1..21: mol_type = other RNA
tccaagtcactgcagtgtaaa

SEQ ID NO: 655 - RNA, 21 nt, synthetic construct
  source 1..21: mol_type = other RNA
ctcagtaccaataaagcaaga

SEQ ID NO: 656 - RNA, 21 nt, synthetic construct
  source 1..21: mol_type = other RNA
accgatgagaataactacatg

SEQ ID NO: 657 - RNA, 21 nt, synthetic construct
  source 1..21: mol_type = other RNA
atctgtagccctgtaaacaat

SEQ ID NO: 658 - RNA, 21 nt, synthetic construct
  source 1..21: mol_type = other RNA
agcatgaaatcctcaatttcc

SEQ ID NO: 659 - RNA, 21 nt, synthetic construct
  source 1..21: mol_type = other RNA
tgctattccaaacaacagtac

SEQ ID NO: 660 - RNA, 21 nt, synthetic construct
  source 1..21: mol_type = other RNA
ctgcagtgtaaaatctccagt

SEQ ID NO: 661 - RNA, 21 nt, synthetic construct
  source 1..21: mol_type = other RNA
aagactattattccctatcag

SEQ ID NO: 662 - RNA, 21 nt, synthetic construct
  source 1..21: mol_type = other RNA
tgctgctactaagcacaattc

SEQ ID NO: 663 - RNA, 21 nt, synthetic construct
  source 1..21: mol_type = other RNA
caacacctgagttcctttcct

SEQ ID NO: 664 - RNA, 21 nt, synthetic construct
  source 1..21: mol_type = other RNA
tgtaagagatgctgactattc

SEQ ID NO: 665 - RNA, 21 nt, synthetic construct
  source 1..21: mol_type = other RNA
atctatctgtagccctgtaaa

SEQ ID NO: 666 - RNA, 21 nt, synthetic construct
  source 1..21: mol_type = other RNA
gcttgcagacttcagaaatgt

SEQ ID NO: 667 - RNA, 21 nt, synthetic construct
  source 1..21: mol_type = other RNA
ctttagtggagtcatggaaat

SEQ ID NO: 668 - RNA, 21 nt, synthetic construct
  source 1..21: mol_type = other RNA
tgaggacaaattacatcaaag

SEQ ID NO: 669 - RNA, 21 nt, synthetic construct
  source 1..21: mol_type = other RNA
ttccggtgctattccaaacaa

SEQ ID NO: 670 - RNA, 23 nt, synthetic construct
  source 1..23: mol_type = other RNA
  modified_base 1: mod_base = OTHER; note = 2'-O-methyl-adenosine
  modified_base 1^2: mod_base = OTHER; note = Phosphorothioate bond
  modified_base 2: mod_base = OTHER; note = 2'-Fluoro-uridine
  modified_base 2^3: mod_base = OTHER; note = Phosphorothioate bond
  modified_base 3: mod_base = OTHER; note = 2'-O-methyl-adenosine
  modified_base 4: mod_base = OTHER; note = 2'-O-methyl-adenosine
  modified_base 5: mod_base = um
  modified_base 6: mod_base = OTHER; note = 2'-Fluoro-adenosine
  modified_base 7: mod_base = gm
  modified_base 8: mod_base = OTHER; note = 2'-Fluoro-uridine
  modified_base 9: mod_base = OTHER; note = 2'-Fluoro-cytidine
  modified_base 10: mod_base = um
  modified_base 11: mod_base = um
  modified_base 12: mod_base = um
  modified_base 13: mod_base = OTHER; note = 2'-O-methyl-adenosine
  modified_base 14: mod_base = OTHER; note = 2'-Fluoro-uridine
  modified_base 15: mod_base = cm
  modified_base 16: mod_base = OTHER; note = 2'-Fluoro-adenosine
  modified_base 17: mod_base = um
  modified_base 18: mod_base = cm
  modified_base 19: mod_base = cm
  modified_base 20: mod_base = OTHER; note = 2'-Fluoro-adenosine
  modified_base 21: mod_base = um
  modified_base 21^22: mod_base = OTHER; note = Phosphorothioate bond
  modified_base 22: mod_base = OTHER; note = 2'-O-methyl-adenosine
  modified_base 22^23: mod_base = OTHER; note = Phosphorothioate bond
  modified_base 23: mod_base = OTHER; note = 2'-O-methyl-adenosine
ataatagtctttatcatccataa

SEQ ID NO: 671 - RNA, 23 nt, synthetic construct
  source 1..23: mol_type = other RNA
  modified_base 1: mod_base = OTHER; note = 2'-O-methyl-adenosine
  modified_base 1^2: mod_base = OTHER; note = Phosphorothioate bond
  modified_base 2: mod_base = OTHER; note = 2'-Fluoro-adenosine
  modified_base 2^3: mod_base = OTHER; note = Phosphorothioate bond
  modified_base 3: mod_base = um
  modified_base 4: mod_base = OTHER; note = 2'-O-methyl-adenosine
  modified_base 5: mod_base = OTHER; note = 2'-O-methyl-adenosine
  modified_base 6: mod_base = OTHER; note = 2'-Fluoro-uridine
  modified_base 7: mod_base = OTHER; note = 2'-O-methyl-adenosine
  modified_base 8: mod_base = OTHER; note = 2'-Fluoro-guanosine
  modified_base 9: mod_base = OTHER; note = 2'-Fluoro-uridine
  modified_base 10: mod_base = cm
  modified_base 11: mod_base = um
  modified_base 12: mod_base = um
  modified_base 13: mod_base = um
  modified_base 14: mod_base = OTHER; note = 2'-Fluoro-adenosine
  modified_base 15: mod_base = um
  modified_base 16: mod_base = OTHER; note = 2'-Fluoro-cytidine
  modified_base 17: mod_base = OTHER; note = 2'-O-methyl-adenosine
  modified_base 18: mod_base = um
  modified_base 19: mod_base = cm
  modified_base 20: mod_base = OTHER; note = 2'-Fluoro-cytidine
  modified_base 21: mod_base = OTHER; note = 2'-O-methyl-adenosine
  modified_base 21^22: mod_base = OTHER; note = Phosphorothioate bond
  modified_base 22: mod_base = um
  modified_base 22^23: mod_base = OTHER; note = Phosphorothioate bond
  modified_base 23: mod_base = OTHER; note = 2'-O-methyl-adenosine
aataatagtctttatcatccata

SEQ ID NO: 672 - RNA, 23 nt, synthetic construct
  source 1..23: mol_type = other RNA
  modified_base 1: mod_base = OTHER; note = 2'-O-methyl-adenosine
  modified_base 1^2: mod_base = OTHER; note = Phosphorothioate bond
  modified_base 2: mod_base = OTHER; note = 2'-Fluoro-uridine
  modified_base 2^3: mod_base = OTHER; note = Phosphorothioate bond
  modified_base 3: mod_base = OTHER; note = 2'-O-methyl-adenosine
  modified_base 4: mod_base = gm
  modified_base 5: mod_base = um
  modified_base 6: mod_base = OTHER; note = 2'-Fluoro-cytidine
  modified_base 7: mod_base = um
  modified_base 8: mod_base = OTHER; note = 2'-Fluoro-uridine
  modified_base 9: mod_base = OTHER; note = 2'-Fluoro-uridine
  modified_base 10: mod_base = OTHER; note = 2'-O-methyl-adenosine
  modified_base 11: mod_base = um
  modified_base 12: mod_base = cm
  modified_base 13: mod_base = OTHER; note = 2'-O-methyl-adenosine
  modified_base 14: mod_base = OTHER; note = 2'-Fluoro-uridine
  modified_base 15: mod_base = cm
  modified_base 16: mod_base = OTHER; note = 2'-Fluoro-cytidine
  modified_base 17: mod_base = OTHER; note = 2'-O-methyl-adenosine
  modified_base 18: mod_base = um
  modified_base 19: mod_base = OTHER; note = 2'-O-methyl-adenosine
  modified_base 20: mod_base = OTHER; note = 2'-Fluoro-adenosine
  modified_base 21: mod_base = OTHER; note = 2'-O-methyl-adenosine
  modified_base 21^22: mod_base = OTHER; note = Phosphorothioate bond
  modified_base 22: mod_base = gm
  modified_base 22^23: mod_base = OTHER; note = Phosphorothioate bond
  modified_base 23: mod_base = gm
atagtctttatcatccataaagg

SEQ ID NO: 673 - RNA, 23 nt, synthetic construct
  source 1..23: mol_type = other RNA
  modified_base 1: mod_base = OTHER; note = 2'-O-methyl-adenosine
  modified_base 1^2: mod_base = OTHER; note = Phosphorothioate bond
  modified_base 2: mod_base = OTHER; note = 2'-Fluoro-adenosine
  modified_base 2^3: mod_base = OTHER; note = Phosphorothioate bond
  modified_base 3: mod_base = OTHER; note = 2'-O-methyl-adenosine
  modified_base 4: mod_base = OTHER; note = 2'-O-methyl-adenosine
  modified_base 5: mod_base = cm
  modified_base 6: mod_base = OTHER; note = 2'-Fluoro-uridine
  modified_base 7: mod_base = um
  modified_base 8: mod_base = OTHER; note = 2'-Fluoro-uridine
  modified_base 9: mod_base = OTHER; note = 2'-Fluoro-cytidine
  modified_base 10: mod_base = OTHER; note = 2'-O-methyl-adenosine
  modified_base 11: mod_base = um
  modified_base 12: mod_base = gm
  modified_base 13: mod_base = OTHER; note = 2'-O-methyl-adenosine
  modified_base 14: mod_base = OTHER; note = 2'-Fluoro-uridine
  modified_base 15: mod_base = gm
  modified_base 16: mod_base = OTHER; note = 2'-Fluoro-guanosine
  modified_base 17: mod_base = um
  modified_base 18: mod_base = gm
  modified_base 19: mod_base = um
  modified_base 20: mod_base = OTHER; note = 2'-Fluoro-adenosine
  modified_base 21: mod_base = um
  modified_base 21^22: mod_base = OTHER; note = Phosphorothioate bond
  modified_base 22: mod_base = um
  modified_base 22^23: mod_base = OTHER; note = Phosphorothioate bond
  modified_base 23: mod_base = cm
aaaactttcatgatggtgtattc

SEQ ID NO: 674 - RNA, 23 nt, synthetic construct
  source 1..23: mol_type = other RNA
  modified_base 1: mod_base = OTHER; note = 2'-O-methyl-adenosine
  modified_base 1^2: mod_base = OTHER; note = Phosphorothioate bond
  modified_base 2: mod_base = OTHER; note = 2'-Fluoro-adenosine
  modified_base 2^3: mod_base = OTHER; note = Phosphorothioate bond
  modified_base 3: mod_base = OTHER; note = 2'-O-methyl-adenosine
  modified_base 4: mod_base = cm
  modified_base 5: mod_base = OTHER; note = 2'-O-methyl-adenosine
  modified_base 6: mod_base = OTHER; note = 2'-Fluoro-cytidine
  modified_base 7: mod_base = um
  modified_base 8: mod_base = OTHER; note = 2'-Fluoro-uridine
  modified_base 9: mod_base = OTHER; note = 2'-Fluoro-cytidine
  modified_base 10: mod_base = gm
  modified_base 11: mod_base = um
  modified_base 12: mod_base = OTHER; note = 2'-O-methyl-adenosine
  modified_base 13: mod_base = OTHER; note = 2'-O-methyl-adenosine
  modified_base 14: mod_base = OTHER; note = 2'-Fluoro-adenosine
  modified_base 15: mod_base = gm
  modified_base 16: mod_base = OTHER; note = 2'-Fluoro-uridine
  modified_base 17: mod_base = OTHER; note = 2'-O-methyl-adenosine
  modified_base 18: mod_base = gm
  modified_base 19: mod_base = OTHER; note = 2'-O-methyl-adenosine
  modified_base 20: mod_base = OTHER; note = 2'-Fluoro-guanosine
  modified_base 21: mod_base = cm
  modified_base 21^22: mod_base = OTHER; note = Phosphorothioate bond
  modified_base 22: mod_base = um
  modified_base 22^23: mod_base = OTHER; note = Phosphorothioate bond
  modified_base 23: mod_base = um
aaacacttcgtaaagtagagctt

SEQ ID NO: 675 - RNA, 23 nt, synthetic construct
  source 1..23: mol_type = other RNA
  modified_base 1: mod_base = gm
  modified_base 1^2: mod_base = OTHER; note = Phosphorothioate bond
  modified_base 2: mod_base = OTHER; note = 2'-Fluoro-adenosine
  modified_base 2^3: mod_base = OTHER; note = Phosphorothioate bond
  modified_base 3: mod_base = OTHER; note = 2'-O-methyl-adenosine
  modified_base 4: mod_base = OTHER; note = 2'-O-methyl-adenosine
  modified_base 5: mod_base = cm
  modified_base 6: mod_base = OTHER; note = 2'-Fluoro-adenosine
  modified_base 7: mod_base = cm
  modified_base 8: mod_base = OTHER; note = 2'-Fluoro-uridine
  modified_base 9: mod_base = OTHER; note = 2'-Fluoro-uridine
  modified_base 10: mod_base = cm
  modified_base 11: mod_base = gm
  modified_base 12: mod_base = um
  modified_base 13: mod_base = OTHER; note = 2'-O-methyl-adenosine
  modified_base 14: mod_base = OTHER; note = 2'-Fluoro-adenosine
  modified_base 15: mod_base = OTHER; note = 2'-O-methyl-adenosine
  modified_base 16: mod_base = OTHER; note = 2'-Fluoro-guanosine
  modified_base 17: mod_base = um
  modified_base 18: mod_base = OTHER; note = 2'-O-methyl-adenosine
  modified_base 19: mod_base = gm
  modified_base 20: mod_base = OTHER; note = 2'-Fluoro-adenosine
  modified_base 21: mod_base = gm
  modified_base 21^22: mod_base = OTHER; note = Phosphorothioate bond
  modified_base 22: mod_base = cm
  modified_base 22^23: mod_base = OTHER; note = Phosphorothioate bond
  modified_base 23: mod_base = um
gaaacacttcgtaaagtagagct

SEQ ID NO: 676 - RNA, 23 nt, synthetic construct
  source 1..23: mol_type = other RNA
  modified_base 1: mod_base = um
  modified_base 1^2: mod_base = OTHER; note = Phosphorothioate bond
  modified_base 2: mod_base = OTHER; note = 2'-Fluoro-cytidine
  modified_base 2^3: mod_base = OTHER; note = Phosphorothioate bond
  modified_base 3: mod_base = um
  modified_base 4: mod_base = um
  modified_base 5: mod_base = OTHER; note = 2'-O-methyl-adenosine
  modified_base 6: mod_base = OTHER; note = 2'-Fluoro-cytidine
  modified_base 7: mod_base = OTHER; note = 2'-O-methyl-adenosine
  modified_base 8: mod_base = OTHER; note = 2'-Fluoro-guanosine
  modified_base 9: mod_base = OTHER; note = 2'-Fluoro-adenosine
  modified_base 10: mod_base = OTHER; note = 2'-O-methyl-adenosine
  modified_base 11: mod_base = um
  modified_base 12: mod_base = cm
  modified_base 13: mod_base = cm
  modified_base 14: mod_base = OTHER; note = 2'-Fluoro-adenosine
  modified_base 15: mod_base = um
  modified_base 16: mod_base = OTHER; note = 2'-Fluoro-adenosine
  modified_base 17: mod_base = um
  modified_base 18: mod_base = OTHER; note = 2'-O-methyl-adenosine
  modified_base 19: mod_base = um
  modified_base 20: mod_base = OTHER; note = 2'-Fluoro-adenosine
  modified_base 21: mod_base = OTHER; note = 2'-O-methyl-adenosine
  modified_base 21^22: mod_base = OTHER; note = Phosphorothioate bond
  modified_base 22: mod_base = OTHER; note = 2'-O-methyl-adenosine
  modified_base 22^23: mod_base = OTHER; note = Phosphorothioate bond
  modified_base 23: mod_base = cm
tcttacagaatccatatataaac

SEQ ID NO: 677 - RNA, 23 nt, synthetic construct
  source 1..23: mol_type = other RNA
  modified_base 1: mod_base = um
  modified_base 1^2: mod_base = OTHER; note = Phosphorothioate bond
  modified_base 2: mod_base = OTHER; note = 2'-Fluoro-adenosine
  modified_base 2^3: mod_base = OTHER; note = Phosphorothioate bond
  modified_base 3: mod_base = OTHER; note = 2'-O-methyl-adenosine
  modified_base 4: mod_base = OTHER; note = 2'-O-methyl-adenosine
  modified_base 5: mod_base = OTHER; note = 2'-O-methyl-adenosine
  modified_base 6: mod_base = OTHER; note = 2'-Fluoro-uridine
  modified_base 7: mod_base = um
  modified_base 8: mod_base = OTHER; note = 2'-Fluoro-uridine
  modified_base 9: mod_base = OTHER; note = 2'-Fluoro-cytidine
  modified_base 10: mod_base = OTHER; note = 2'-O-methyl-adenosine
  modified_base 11: mod_base = cm
  modified_base 12: mod_base = cm
  modified_base 13: mod_base = OTHER; note = 2'-O-methyl-adenosine
  modified_base 14: mod_base = OTHER; note = 2'-Fluoro-guanosine
  modified_base 15: mod_base = cm
  modified_base 16: mod_base = OTHER; note = 2'-Fluoro-uridine
  modified_base 17: mod_base = gm
  modified_base 18: mod_base = um
  modified_base 19: mod_base = um
  modified_base 20: mod_base = OTHER; note = 2'-Fluoro-cytidine
  modified_base 21: mod_base = OTHER; note = 2'-O-methyl-adenosine
  modified_base 21^22: mod_base = OTHER; note = Phosphorothioate bond
  modified_base 22: mod_base = OTHER; note = 2'-O-methyl-adenosine
  modified_base 22^23: mod_base = OTHER; note = Phosphorothioate bond
  modified_base 23: mod_base = cm
taaaatttcaccagctgttcaac

SEQ ID NO: 678 - RNA, 23 nt, synthetic construct
  source 1..23: mol_type = other RNA
  modified_base 1: mod_base = um
  modified_base 1^2: mod_base = OTHER; note = Phosphorothioate bond
  modified_base 2: mod_base = OTHER; note = 2'-Fluoro-adenosine
  modified_base 2^3: mod_base = OTHER; note = Phosphorothioate bond
  modified_base 3: mod_base = cm
  modified_base 4: mod_base = um
  modified_base 5: mod_base = um
  modified_base 6: mod_base = OTHER; note = 2'-Fluoro-adenosine
  modified_base 7: mod_base = OTHER; note = 2'-O-methyl-adenosine
  modified_base 8: mod_base = OTHER; note = 2'-Fluoro-cytidine
  modified_base 9: mod_base = OTHER; note = 2'-Fluoro-guanosine
  modified_base 10: mod_base = gm
  modified_base 11: mod_base = OTHER; note = 2'-O-methyl-adenosine
  modified_base 12: mod_base = cm
  modified_base 13: mod_base = um
  modified_base 14: mod_base = OTHER; note = 2'-Fluoro-uridine
  modified_base 15: mod_base = gm
  modified_base 16: mod_base = OTHER; note = 2'-Fluoro-adenosine
  modified_base 17: mod_base = gm
  modified_base 18: mod_base = OTHER; note = 2'-O-methyl-adenosine
  modified_base 19: mod_base = gm
  modified_base 20: mod_base = OTHER; note = 2'-Fluoro-adenosine
  modified_base 21: mod_base = gm
  modified_base 21^22: mod_base = OTHER; note = Phosphorothioate bond
  modified_base 22: mod_base = gm
  modified_base 22^23: mod_base = OTHER; note = Phosphorothioate bond
  modified_base 23: mod_base = OTHER; note = 2'-O-methyl-adenosine
tacttaacggacttgagagagga

SEQ ID NO: 679 - RNA, 23 nt, synthetic construct
  source 1..23: mol_type = other RNA
  modified_base 1: mod_base = gm
  modified_base 1^2: mod_base = OTHER; note = Phosphorothioate bond
  modified_base 2: mod_base = OTHER; note = 2'-Fluoro-uridine
  modified_base 2^3: mod_base = OTHER; note = Phosphorothioate bond
  modified_base 3: mod_base = OTHER; note = 2'-O-methyl-adenosine
  modified_base 4: mod_base = OTHER; note = 2'-O-methyl-adenosine
  modified_base 5: mod_base = OTHER; note = 2'-O-methyl-adenosine
  modified_base 6: mod_base = OTHER; note = 2'-Fluoro-adenosine
  modified_base 7: mod_base = um
  modified_base 8: mod_base = OTHER; note = 2'-Fluoro-uridine
  modified_base 9: mod_base = OTHER; note = 2'-Fluoro-uridine
  modified_base 10: mod_base = cm
  modified_base 11: mod_base = OTHER; note = 2'-O-methyl-adenosine
  modified_base 12: mod_base = cm
  modified_base 13: mod_base = cm
  modified_base 14: mod_base = OTHER; note = 2'-Fluoro-adenosine
  modified_base 15: mod_base = gm
  modified_base 16: mod_base = OTHER; note = 2'-Fluoro-cytidine
  modified_base 17: mod_base = um
  modified_base 18: mod_base = gm
  modified_base 19: mod_base = um
  modified_base 20: mod_base = OTHER; note = 2'-Fluoro-uridine
  modified_base 21: mod_base = cm
  modified_base 21^22: mod_base = OTHER; note = Phosphorothioate bond
  modified_base 22: mod_base = OTHER; note = 2'-O-methyl-adenosine
  modified_base 22^23: mod_base = OTHER; note = Phosphorothioate bond
  modified_base 23: mod_base = OTHER; note = 2'-O-methyl-adenosine
gtaaaatttcaccagctgttcaa

SEQ ID NO: 680 - RNA, 23 nt, synthetic construct
  source 1..23: mol_type = other RNA
  modified_base 1: mod_base = OTHER; note = 2'-O-methyl-adenosine
  modified_base 1^2: mod_base = OTHER; note = Phosphorothioate bond
  modified_base 2: mod_base = OTHER; note = 2'-Fluoro-uridine
  modified_base 2^3: mod_base = OTHER; note = Phosphorothioate bond
  modified_base 3: mod_base = cm
  modified_base 4: mod_base = um
  modified_base 5: mod_base = cm
  modified_base 6: mod_base = OTHER; note = 2'-Fluoro-uridine
  modified_base 7: mod_base = um
  modified_base 8: mod_base = OTHER; note = 2'-Fluoro-adenosine
  modified_base 9: mod_base = OTHER; note = 2'-Fluoro-cytidine
  modified_base 10: mod_base = OTHER; note = 2'-O-methyl-adenosine
  modified_base 11: mod_base = gm
  modified_base 12: mod_base = OTHER; note = 2'-O-methyl-adenosine
  modified_base 13: mod_base = OTHER; note = 2'-O-methyl-adenosine
  modified_base 14: mod_base = OTHER; note = 2'-Fluoro-uridine
  modified_base 15: mod_base = cm
  modified_base 16: mod_base = OTHER; note = 2'-Fluoro-cytidine
  modified_base 17: mod_base = OTHER; note = 2'-O-methyl-adenosine
  modified_base 18: mod_base = um
  modified_base 19: mod_base = OTHER; note = 2'-O-methyl-adenosine
  modified_base 20: mod_base = OTHER; note = 2'-Fluoro-uridine
  modified_base 21: mod_base = OTHER; note = 2'-O-methyl-adenosine
  modified_base 21^22: mod_base = OTHER; note = Phosphorothioate bond
  modified_base 22: mod_base = um
  modified_base 22^23: mod_base = OTHER; note = Phosphorothioate bond
  modified_base 23: mod_base = OTHER; note = 2'-O-methyl-adenosine
atctcttacagaatccatatata

SEQ ID NO: 681 - RNA, 23 nt, synthetic construct
  source 1..23: mol_type = other RNA
  modified_base 1: mod_base = gm
  modified_base 1^2: mod_base = OTHER; note = Phosphorothioate bond
  modified_base 2: mod_base = OTHER; note = 2'-Fluoro-uridine
  modified_base 2^3: mod_base = OTHER; note = Phosphorothioate bond
  modified_base 3: mod_base = OTHER; note = 2'-O-methyl-adenosine
  modified_base 4: mod_base = OTHER; note = 2'-O-methyl-adenosine
  modified_base 5: mod_base = OTHER; note = 2'-O-methyl-adenosine
  modified_base 6: mod_base = OTHER; note = 2'-Fluoro-guanosine
  modified_base 7: mod_base = um
  modified_base 8: mod_base = OTHER; note = 2'-Fluoro-adenosine
  modified_base 9: mod_base = OTHER; note = 2'-Fluoro-guanosine
  modified_base 10: mod_base = OTHER; note = 2'-O-methyl-adenosine
  modified_base 11: mod_base = gm
  modified_base 12: mod_base = cm
  modified_base 13: mod_base = um
  modified_base 14: mod_base = OTHER; note = 2'-Fluoro-uridine
  modified_base 15: mod_base = gm
  modified_base 16: mod_base = OTHER; note = 2'-Fluoro-adenosine
  modified_base 17: mod_base = um
  modified_base 18: mod_base = OTHER; note = 2'-O-methyl-adenosine
  modified_base 19: mod_base = cm
  modified_base 20: mod_base = OTHER; note = 2'-Fluoro-adenosine
  modified_base 21: mod_base = um
  modified_base 21^22: mod_base = OTHER; note = Phosphorothioate bond
  modified_base 22: mod_base = um
  modified_base 22^23: mod_base = OTHER; note = Phosphorothioate bond
  modified_base 23: mod_base = um
gtaaagtagagcttgatacattt

SEQ ID NO: 682 - RNA, 23 nt, synthetic construct
  source 1..23: mol_type = other RNA
  modified_base 1: mod_base = um
  modified_base 1^2: mod_base = OTHER; note = Phosphorothioate bond
  modified_base 2: mod_base = OTHER; note = 2'-Fluoro-guanosine
  modified_base 2^3: mod_base = OTHER; note = Phosphorothioate bond
  modified_base 3: mod_base = gm
  modified_base 4: mod_base = OTHER; note = 2'-O-methyl-adenosine
  modified_base 5: mod_base = gm
  modified_base 6: mod_base = OTHER; note = 2'-Fluoro-adenosine
  modified_base 7: mod_base = um
  modified_base 8: mod_base = OTHER; note = 2'-Fluoro-uridine
  modified_base 9: mod_base = OTHER; note = 2'-Fluoro-uridine
  modified_base 10: mod_base = um
  modified_base 11: mod_base = OTHER; note = 2'-O-methyl-adenosine
  modified_base 12: mod_base = cm
  modified_base 13: mod_base = OTHER; note = 2'-O-methyl-adenosine
  modified_base 14: mod_base = OTHER; note = 2'-Fluoro-cytidine
  modified_base 15: mod_base = um
  modified_base 16: mod_base = OTHER; note = 2'-Fluoro-guanosine
  modified_base 17: mod_base = cm
  modified_base 18: mod_base = OTHER; note = 2'-O-methyl-adenosine
  modified_base 19: mod_base = gm
  modified_base 20: mod_base = OTHER; note = 2'-Fluoro-uridine
  modified_base 21: mod_base = gm
  modified_base 21^22: mod_base = OTHER; note = Phosphorothioate bond
  modified_base 22: mod_base = OTHER; note = 2'-O-methyl-adenosine
  modified_base 22^23: mod_base = OTHER; note = Phosphorothioate bond
  modified_base 23: mod_base = cm
tggagattttacactgcagtgac

SEQ ID NO: 683 - RNA, 23 nt, synthetic construct
  source 1..23: mol_type = other RNA
  modified_base 1: mod_base = OTHER; note = 2'-O-methyl-adenosine
  modified_base 1^2: mod_base = OTHER; note = Phosphorothioate bond
  modified_base 2: mod_base = OTHER; note = 2'-Fluoro-uridine
  modified_base 2^3: mod_base = OTHER; note = Phosphorothioate bond
  modified_base 3: mod_base = um
  modified_base 4: mod_base = um
  modified_base 5: mod_base = OTHER; note = 2'-O-methyl-adenosine
  modified_base 6: mod_base = OTHER; note = 2'-Fluoro-uridine
  modified_base 7: mod_base = um
  modified_base 8: mod_base = OTHER; note = 2'-Fluoro-uridine
  modified_base 9: mod_base = OTHER; note = 2'-Fluoro-uridine
  modified_base 10: mod_base = gm
  modified_base 11: mod_base = cm
  modified_base 12: mod_base = um
  modified_base 13: mod_base = OTHER; note = 2'-O-methyl-adenosine
  modified_base 14: mod_base = OTHER; note = 2'-Fluoro-uridine
  modified_base 15: mod_base = um
  modified_base 16: mod_base = OTHER; note = 2'-Fluoro-uridine
  modified_base 17: mod_base = cm
  modified_base 18: mod_base = cm
  modified_base 19: mod_base = um
  modified_base 20: mod_base = OTHER; note = 2'-Fluoro-cytidine
  modified_base 21: mod_base = cm
  modified_base 21^22: mod_base = OTHER; note = Phosphorothioate bond
  modified_base 22: mod_base = um
  modified_base 22^23: mod_base = OTHER; note = Phosphorothioate bond
  modified_base 23: mod_base = OTHER; note = 2'-O-methyl-adenosine
atttattttgctatttcctccta

SEQ ID NO: 684 - RNA, 23 nt, synthetic construct
  source 1..23: mol_type = other RNA
  modified_base 1: mod_base = OTHER; note = 2'-O-methyl-adenosine
  modified_base 1^2: mod_base = OTHER; note = Phosphorothioate bond
  modified_base 2: mod_base = OTHER; note = 2'-Fluoro-adenosine
  modified_base 2^3: mod_base = OTHER; note = Phosphorothioate bond
  modified_base 3: mod_base = um
  modified_base 4: mod_base = gm
  modified_base 5: mod_base = OTHER; note = 2'-O-methyl-adenosine
  modified_base 6: mod_base = OTHER; note = 2'-Fluoro-uridine
  modified_base 7: mod_base = gm
  modified_base 8: mod_base = OTHER; note = 2'-Fluoro-cytidine
  modified_base 9: mod_base = OTHER; note = 2'-Fluoro-adenosine
  modified_base 10: mod_base = OTHER; note = 2'-O-methyl-adenosine
  modified_base 11: mod_base = um
  modified_base 12: mod_base = cm
  modified_base 13: mod_base = OTHER; note = 2'-O-methyl-adenosine
  modified_base 14: mod_base = OTHER; note = 2'-Fluoro-uridine
  modified_base 15: mod_base = um
  modified_base 16: mod_base = OTHER; note = 2'-Fluoro-uridine
  modified_base 17: mod_base = cm
  modified_base 18: mod_base = um
  modified_base 19: mod_base = um
  modified_base 20: mod_base = OTHER; note = 2'-Fluoro-cytidine
  modified_base 21: mod_base = cm
  modified_base 21^22: mod_base = OTHER; note = Phosphorothioate bond
  modified_base 22: mod_base = OTHER; note = 2'-O-methyl-adenosine
  modified_base 22^23: mod_base = OTHER; note = Phosphorothioate bond
  modified_base 23: mod_base = gm
aatgatgcaatcatttcttccag

SEQ ID NO: 685 - RNA, 23 nt, synthetic construct
  source 1..23: mol_type = other RNA
  modified_base 1: mod_base = gm
  modified_base 1^2: mod_base = OTHER; note = Phosphorothioate bond
  modified_base 2: mod_base = OTHER; note = 2'-Fluoro-adenosine
  modified_base 2^3: mod_base = OTHER; note = Phosphorothioate bond
  modified_base 3: mod_base = gm
  modified_base 4: mod_base = OTHER; note = 2'-O-methyl-adenosine
  modified_base 5: mod_base = cm
  modified_base 6: mod_base = OTHER; note = 2'-Fluoro-uridine
  modified_base 7: mod_base = gm
  modified_base 8: mod_base = OTHER; note = 2'-Fluoro-guanosine
  modified_base 9: mod_base = OTHER; note = 2'-Fluoro-adenosine
  modified_base 10: mod_base = gm
  modified_base 11: mod_base = OTHER; note = 2'-O-methyl-adenosine
  modified_base 12: mod_base = um
  modified_base 13: mod_base = um
  modified_base 14: mod_base = OTHER; note = 2'-Fluoro-uridine
  modified_base 15: mod_base = um
  modified_base 16: mod_base = OTHER; note = 2'-Fluoro-adenosine
  modified_base 17: mod_base = cm
  modified_base 18: mod_base = OTHER; note = 2'-O-methyl-adenosine
  modified_base 19: mod_base = cm
  modified_base 20: mod_base = OTHER; note = 2'-Fluoro-uridine
  modified_base 21: mod_base = gm
  modified_base 21^22: mod_base = OTHER; note = Phosphorothioate bond
  modified_base 22: mod_base = cm
  modified_base 22^23: mod_base = OTHER; note = Phosphorothioate bond
  modified_base 23: mod_base = OTHER; note = 2'-O-methyl-adenosine
gagactggagattttacactgca

SEQ ID NO: 686 - RNA, 23 nt, synthetic construct
  source 1..23: mol_type = other RNA
  modified_base 1: mod_base = OTHER; note = 2'-O-methyl-adenosine
  modified_base 1^2: mod_base = OTHER; note = Phosphorothioate bond
  modified_base 2: mod_base = OTHER; note = 2'-Fluoro-adenosine
  modified_base 2^3: mod_base = OTHER; note = Phosphorothioate bond
  modified_base 3: mod_base = gm
  modified_base 4: mod_base = OTHER; note = 2'-O-methyl-adenosine
  modified_base 5: mod_base = cm
  modified_base 6: mod_base = OTHER; note = 2'-Fluoro-adenosine
  modified_base 7: mod_base = um
  modified_base 8: mod_base = OTHER; note = 2'-Fluoro-uridine
  modified_base 9: mod_base = OTHER; note = 2'-Fluoro-uridine
  modified_base 10: mod_base = cm
  modified_base 11: mod_base = um
  modified_base 12: mod_base = gm
  modified_base 13: mod_base = OTHER; note = 2'-O-methyl-adenosine
  modified_base 14: mod_base = OTHER; note = 2'-Fluoro-adenosine
  modified_base 15: mod_base = gm
  modified_base 16: mod_base = OTHER; note = 2'-Fluoro-uridine
  modified_base 17: mod_base = cm
  modified_base 18: mod_base = um
  modified_base 19: mod_base = gm
  modified_base 20: mod_base = OTHER; note = 2'-Fluoro-cytidine
  modified_base 21: mod_base = OTHER; note = 2'-O-methyl-adenosine
  modified_base 21^22: mod_base = OTHER; note = Phosphorothioate bond
  modified_base 22: mod_base = OTHER; note = 2'-O-methyl-adenosine
  modified_base 22^23: mod_base = OTHER; note = Phosphorothioate bond
  modified_base 23: mod_base = gm
aagacatttctgaagtctgcaag

SEQ ID NO: 687 - RNA, 23 nt, synthetic construct
  source 1..23: mol_type = other RNA
  modified_base 1: mod_base = um
  modified_base 1^2: mod_base = OTHER; note = Phosphorothioate bond
  modified_base 2: mod_base = OTHER; note = 2'-Fluoro-guanosine
  modified_base 2^3: mod_base = OTHER; note = Phosphorothioate bond
  modified_base 3: mod_base = gm
  modified_base 4: mod_base = OTHER; note = 2'-O-methyl-adenosine
  modified_base 5: mod_base = gm
  modified_base 6: mod_base = OTHER; note = 2'-Fluoro-adenosine
  modified_base 7: mod_base = cm
  modified_base 8: mod_base = OTHER; note = 2'-Fluoro-uridine
  modified_base 9: mod_base = OTHER; note = 2'-Fluoro-guanosine
  modified_base 10: mod_base = gm
  modified_base 11: mod_base = OTHER; note = 2'-O-methyl-adenosine
  modified_base 12: mod_base = gm
  modified_base 13: mod_base = OTHER; note = 2'-O-methyl-adenosine
  modified_base 14: mod_base = OTHER; note = 2'-Fluoro-uridine
  modified_base 15: mod_base = um
  modified_base 16: mod_base = OTHER; note = 2'-Fluoro-uridine
  modified_base 17: mod_base = um
  modified_base 18: mod_base = OTHER; note = 2'-O-methyl-adenosine
  modified_base 19: mod_base = cm
  modified_base 20: mod_base = OTHER; note = 2'-Fluoro-adenosine
  modified_base 21: mod_base = cm
  modified_base 21^22: mod_base = OTHER; note = Phosphorothioate bond
  modified_base 22: mod_base = um
  modified_base 22^23: mod_base = OTHER; note = Phosphorothioate bond
  modified_base 23: mod_base = gm
tggagactggagattttacactg

SEQ ID NO: 688 - RNA, 23 nt, synthetic construct
  source 1..23: mol_type = other RNA
  modified_base 1: mod_base = um
  modified_base 1^2: mod_base = OTHER; note = Phosphorothioate bond
  modified_base 2: mod_base = OTHER; note = 2'-Fluoro-uridine
  modified_base 2^3: mod_base = OTHER; note = Phosphorothioate bond
  modified_base 3: mod_base = um
  modified_base 4: mod_base = um
  modified_base 5: mod_base = gm
  modified_base 6: mod_base = OTHER; note = 2'-Fluoro-adenosine
  modified_base 7: mod_base = OTHER; note = 2'-O-methyl-adenosine
  modified_base 8: mod_base = OTHER; note = 2'-Fluoro-guanosine
  modified_base 9: mod_base = OTHER; note = 2'-Fluoro-adenosine
  modified_base 10: mod_base = OTHER; note = 2'-O-methyl-adenosine
  modified_base 11: mod_base = OTHER; note = 2'-O-methyl-adenosine
  modified_base 12: mod_base = OTHER; note = 2'-O-methyl-adenosine
  modified_base 13: mod_base = cm
  modified_base 14: mod_base = OTHER; note = 2'-Fluoro-uridine
  modified_base 15: mod_base = um
  modified_base 16: mod_base = OTHER; note = 2'-Fluoro-uridine
  modified_base 17: mod_base = gm
  modified_base 18: mod_base = cm
  modified_base 19: mod_base = OTHER; note = 2'-O-methyl-adenosine
  modified_base 20: mod_base = OTHER; note = 2'-Fluoro-guanosine
  modified_base 21: mod_base = cm
  modified_base 21^22: mod_base = OTHER; note = Phosphorothioate bond
  modified_base 22: mod_base = um
  modified_base 22^23: mod_base = OTHER; note = Phosphorothioate bond
  modified_base 23: mod_base = gm
ttttgaagaaaactttgcagctg

SEQ ID NO: 689 - RNA, 23 nt, synthetic construct
  source 1..23: mol_type = other RNA
  modified_base 1: mod_base = um
  modified_base 1^2: mod_base = OTHER; note = Phosphorothioate bond
  modified_base 2: mod_base = OTHER; note = 2'-Fluoro-uridine
  modified_base 2^3: mod_base = OTHER; note = Phosphorothioate bond
  modified_base 3: mod_base = um
  modified_base 4: mod_base = gm
  modified_base 5: mod_base = OTHER; note = 2'-O-methyl-adenosine
  modified_base 6: mod_base = OTHER; note = 2'-Fluoro-adenosine
  modified_base 7: mod_base = gm
  modified_base 8: mod_base = OTHER; note = 2'-Fluoro-adenosine
  modified_base 9: mod_base = OTHER; note = 2'-Fluoro-adenosine
  modified_base 10: mod_base = OTHER; note = 2'-O-methyl-adenosine
  modified_base 11: mod_base = OTHER; note = 2'-O-methyl-adenosine
  modified_base 12: mod_base = cm
  modified_base 13: mod_base = um
  modified_base 14: mod_base = OTHER; note = 2'-Fluoro-uridine
  modified_base 15: mod_base = um
  modified_base 16: mod_base = OTHER; note = 2'-Fluoro-guanosine
  modified_base 17: mod_base = cm
  modified_base 18: mod_base = OTHER; note = 2'-O-methyl-adenosine
  modified_base 19: mod_base = gm
  modified_base 20: mod_base = OTHER; note = 2'-Fluoro-cytidine
  modified_base 21: mod_base = um
  modified_base 21^22: mod_base = OTHER; note = Phosphorothioate bond
  modified_base 22: mod_base = gm
  modified_base 22^23: mod_base = OTHER; note = Phosphorothioate bond
  modified_base 23: mod_base = cm
tttgaagaaaactttgcagctgc

SEQ ID NO: 690 - RNA, 23 nt, synthetic construct
  source 1..23: mol_type = other RNA
  modified_base 1: mod_base = um
  modified_base 1^2: mod_base = OTHER; note = Phosphorothioate bond
  modified_base 2: mod_base = OTHER; note = 2'-Fluoro-adenosine
  modified_base 2^3: mod_base = OTHER; note = Phosphorothioate bond
  modified_base 3: mod_base = gm
  modified_base 4: mod_base = gm
  modified_base 5: mod_base = gm
  modified_base 6: mod_base = OTHER; note = 2'-Fluoro-adenosine
  modified_base 7: mod_base = OTHER; note = 2'-O-methyl-adenosine
  modified_base 8: mod_base = OTHER; note = 2'-Fluoro-uridine
  modified_base 9: mod_base = OTHER; note = 2'-Fluoro-adenosine
  modified_base 10: mod_base = OTHER; note = 2'-O-methyl-adenosine
  modified_base 11: mod_base = um
  modified_base 12: mod_base = OTHER; note = 2'-O-methyl-adenosine
  modified_base 13: mod_base = gm
  modified_base 14: mod_base = OTHER; note = 2'-Fluoro-uridine
  modified_base 15: mod_base = cm
  modified_base 16: mod_base = OTHER; note = 2'-Fluoro-uridine
  modified_base 17: mod_base = um
  modified_base 18: mod_base = um
  modified_base 19: mod_base = OTHER; note = 2'-O-methyl-adenosine
  modified_base 20: mod_base = OTHER; note = 2'-Fluoro-uridine
  modified_base 21: mod_base = cm
  modified_base 21^22: mod_base = OTHER; note = Phosphorothioate bond
  modified_base 22: mod_base = OTHER; note = 2'-O-methyl-adenosine
  modified_base 22^23: mod_base = OTHER; note = Phosphorothioate bond
  modified_base 23: mod_base = um
tagggaataatagtctttatcat

SEQ ID NO: 691 - RNA, 23 nt, synthetic construct
  source 1..23: mol_type = other RNA
  modified_base 1: mod_base = um
  modified_base 1^2: mod_base = OTHER; note = Phosphorothioate bond
  modified_base 2: mod_base = OTHER; note = 2'-Fluoro-adenosine
  modified_base 2^3: mod_base = OTHER; note = Phosphorothioate bond
  modified_base 3: mod_base = gm
  modified_base 4: mod_base = OTHER; note = 2'-O-methyl-adenosine
  modified_base 5: mod_base = gm
  modified_base 6: mod_base = OTHER; note = 2'-Fluoro-cytidine
  modified_base 7: mod_base = um
  modified_base 8: mod_base = OTHER; note = 2'-Fluoro-uridine
  modified_base 9: mod_base = OTHER; note = 2'-Fluoro-guanosine
  modified_base 10: mod_base = OTHER; note = 2'-O-methyl-adenosine
  modified_base 11: mod_base = um
  modified_base 12: mod_base = OTHER; note = 2'-O-methyl-adenosine
  modified_base 13: mod_base = cm
  modified_base 14: mod_base = OTHER; note = 2'-Fluoro-adenosine
  modified_base 15: mod_base = um
  modified_base 16: mod_base = OTHER; note = 2'-Fluoro-uridine
  modified_base 17: mod_base = um
  modified_base 18: mod_base = um
  modified_base 19: mod_base = cm
  modified_base 20: mod_base = OTHER; note = 2'-Fluoro-uridine
  modified_base 21: mod_base = gm
  modified_base 21^22: mod_base = OTHER; note = Phosphorothioate bond
  modified_base 22: mod_base = gm
  modified_base 22^23: mod_base = OTHER; note = Phosphorothioate bond
  modified_base 23: mod_base = OTHER; note = 2'-O-methyl-adenosine
tagagcttgatacattttctgga

SEQ ID NO: 692 - RNA, 23 nt, synthetic construct
  source 1..23: mol_type = other RNA
  modified_base 1: mod_base = um
  modified_base 1^2: mod_base = OTHER; note = Phosphorothioate bond
  modified_base 2: mod_base = OTHER; note = 2'-Fluoro-uridine
  modified_base 2^3: mod_base = OTHER; note = Phosphorothioate bond
  modified_base 3: mod_base = gm
  modified_base 4: mod_base = cm
  modified_base 5: mod_base = um
  modified_base 6: mod_base = OTHER; note = 2'-Fluoro-uridine
  modified_base 7: mod_base = um
  modified_base 8: mod_base = OTHER; note = 2'-Fluoro-adenosine
  modified_base 9: mod_base = OTHER; note = 2'-Fluoro-uridine
  modified_base 10: mod_base = um
  modified_base 11: mod_base = gm
  modified_base 12: mod_base = gm
  modified_base 13: mod_base = um
  modified_base 14: mod_base = OTHER; note = 2'-Fluoro-adenosine
  modified_base 15: mod_base = cm
  modified_base 16: mod_base = OTHER; note = 2'-Fluoro-uridine
  modified_base 17: mod_base = gm
  modified_base 18: mod_base = OTHER; note = 2'-O-methyl-adenosine
  modified_base 19: mod_base = gm
  modified_base 20: mod_base = OTHER; note = 2'-Fluoro-adenosine
  modified_base 21: mod_base = OTHER; note = 2'-O-methyl-adenosine
  modified_base 21^22: mod_base = OTHER; note = Phosphorothioate bond
  modified_base 22: mod_base = um
  modified_base 22^23: mod_base = OTHER; note = Phosphorothioate bond
  modified_base 23: mod_base = gm
ttgctttattggtactgagaatg

SEQ ID NO: 693 - RNA, 23 nt, synthetic construct
  source 1..23: mol_type = other RNA
  modified_base 1: mod_base = OTHER; note = 2'-O-methyl-adenosine
  modified_base 1^2: mod_base = OTHER; note = Phosphorothioate bond
  modified_base 2: mod_base = OTHER; note = 2'-Fluoro-uridine
  modified_base 2^3: mod_base = OTHER; note = Phosphorothioate bond
  modified_base 3: mod_base = um
  modified_base 4: mod_base = cm
  modified_base 5: mod_base = um
  modified_base 6: mod_base = OTHER; note = 2'-Fluoro-uridine
  modified_base 7: mod_base = um
  modified_base 8: mod_base = OTHER; note = 2'-Fluoro-cytidine
  modified_base 9: mod_base = OTHER; note = 2'-Fluoro-guanosine
  modified_base 10: mod_base = um
  modified_base 11: mod_base = cm
  modified_base 12: mod_base = gm
  modified_base 13: mod_base = OTHER; note = 2'-O-methyl-adenosine
  modified_base 14: mod_base = OTHER; note = 2'-Fluoro-adenosine
  modified_base 15: mod_base = um
  modified_base 16: mod_base = OTHER; note = 2'-Fluoro-cytidine
  modified_base 17: mod_base = um
  modified_base 18: mod_base = um
  modified_base 19: mod_base = OTHER; note = 2'-O-methyl-adenosine
  modified_base 20: mod_base = OTHER; note = 2'-Fluoro-uridine
  modified_base 21: mod_base = cm
  modified_base 21^22: mod_base = OTHER; note = Phosphorothioate bond
  modified_base 22: mod_base = OTHER; note = 2'-O-methyl-adenosine
  modified_base 22^23: mod_base = OTHER; note = Phosphorothioate bond
  modified_base 23: mod_base = OTHER; note = 2'-O-methyl-adenosine
attctttcgtcgaatcttatcaa

SEQ ID NO: 694 - RNA, 23 nt, synthetic construct
  source 1..23: mol_type = other RNA
  modified_base 1: mod_base = um
  modified_base 1^2: mod_base = OTHER; note = Phosphorothioate bond
  modified_base 2: mod_base = OTHER; note = 2'-Fluoro-adenosine
  modified_base 2^3: mod_base = OTHER; note = Phosphorothioate bond
  modified_base 3: mod_base = cm
  modified_base 4: mod_base = OTHER; note = 2'-O-methyl-adenosine
  modified_base 5: mod_base = gm
  modified_base 6: mod_base = OTHER; note = 2'-Fluoro-adenosine
  modified_base 7: mod_base = OTHER; note = 2'-O-methyl-adenosine
  modified_base 8: mod_base = OTHER; note = 2'-Fluoro-uridine
  modified_base 9: mod_base = OTHER; note = 2'-Fluoro-cytidine
  modified_base 10: mod_base = cm
  modified_base 11: mod_base = OTHER; note = 2'-O-methyl-adenosine
  modified_base 12: mod_base = um
  modified_base 13: mod_base = OTHER; note = 2'-O-methyl-adenosine
  modified_base 14: mod_base = OTHER; note = 2'-Fluoro-uridine
  modified_base 15: mod_base = OTHER; note = 2'-O-methyl-adenosine
  modified_base 16: mod_base = OTHER; note = 2'-Fluoro-uridine
  modified_base 17: mod_base = OTHER; note = 2'-O-methyl-adenosine
  modified_base 18: mod_base = OTHER; note = 2'-O-methyl-adenosine
  modified_base 19: mod_base = OTHER; note = 2'-O-methyl-adenosine
  modified_base 20: mod_base = OTHER; note = 2'-Fluoro-cytidine
  modified_base 21: mod_base = cm
  modified_base 21^22: mod_base = OTHER; note = Phosphorothioate bond
  modified_base 22: mod_base = cm
  modified_base 22^23: mod_base = OTHER; note = Phosphorothioate bond
  modified_base 23: mod_base = OTHER; note = 2'-O-methyl-adenosine
tacagaatccatatataaaccca

SEQ ID NO: 695 - RNA, 23 nt, synthetic construct
  source 1..23: mol_type = other RNA
  modified_base 1: mod_base = um
  modified_base 1^2: mod_base = OTHER; note = Phosphorothioate bond
  modified_base 2: mod_base = OTHER; note = 2'-Fluoro-uridine
  modified_base 2^3: mod_base = OTHER; note = Phosphorothioate bond
  modified_base 3: mod_base = um
  modified_base 4: mod_base = gm
  modified_base 5: mod_base = gm
  modified_base 6: mod_base = OTHER; note = 2'-Fluoro-adenosine
  modified_base 7: mod_base = OTHER; note = 2'-O-methyl-adenosine
  modified_base 8: mod_base = OTHER; note = 2'-Fluoro-uridine
  modified_base 9: mod_base = OTHER; note = 2'-Fluoro-uridine
  modified_base 10: mod_base = gm
  modified_base 11: mod_base = um
  modified_base 12: mod_base = gm
  modified_base 13: mod_base = cm
  modified_base 14: mod_base = OTHER; note = 2'-Fluoro-uridine
  modified_base 15: mod_base = um
  modified_base 16: mod_base = OTHER; note = 2'-Fluoro-adenosine
  modified_base 17: mod_base = gm
  modified_base 18: mod_base = um
  modified_base 19: mod_base = OTHER; note = 2'-O-methyl-adenosine
  modified_base 20: mod_base = OTHER; note = 2'-Fluoro-guanosine
  modified_base 21: mod_base = cm
  modified_base 21^22: mod_base = OTHER; note = Phosphorothioate bond
  modified_base 22: mod_base = OTHER; note = 2'-O-methyl-adenosine
  modified_base 22^23: mod_base = OTHER; note = Phosphorothioate bond
  modified_base 23: mod_base = gm
tttggaattgtgcttagtagcag

SEQ ID NO: 696 - RNA, 23 nt, synthetic construct
  source 1..23: mol_type = other RNA
  modified_base 1: mod_base = um
  modified_base 1^2: mod_base = OTHER; note = Phosphorothioate bond
  modified_base 2: mod_base = OTHER; note = 2'-Fluoro-uridine
  modified_base 2^3: mod_base = OTHER; note = Phosphorothioate bond
  modified_base 3: mod_base = OTHER; note = 2'-O-methyl-adenosine
  modified_base 4: mod_base = cm
  modified_base 5: mod_base = OTHER; note = 2'-O-methyl-adenosine
  modified_base 6: mod_base = OTHER; note = 2'-Fluoro-cytidine
  modified_base 7: mod_base = um
  modified_base 8: mod_base = OTHER; note = 2'-Fluoro-guanosine
  modified_base 9: mod_base = OTHER; note = 2'-Fluoro-cytidine
  modified_base 10: mod_base = OTHER; note = 2'-O-methyl-adenosine
  modified_base 11: mod_base = gm
  modified_base 12: mod_base = um
  modified_base 13: mod_base = gm
  modified_base 14: mod_base = OTHER; note = 2'-Fluoro-adenosine
  modified_base 15: mod_base = cm
  modified_base 16: mod_base = OTHER; note = 2'-Fluoro-uridine
  modified_base 17: mod_base = um
  modified_base 18: mod_base = gm
  modified_base 19: mod_base = gm
  modified_base 20: mod_base = OTHER; note = 2'-Fluoro-adenosine
  modified_base 21: mod_base = gm
  modified_base 21^22: mod_base = OTHER; note = Phosphorothioate bond
  modified_base 22: mod_base = gm
  modified_base 22^23: mod_base = OTHER; note = Phosphorothioate bond
  modified_base 23: mod_base = gm
ttacactgcagtgacttggaggg

SEQ ID NO: 697 - RNA, 23 nt, synthetic construct
  source 1..23: mol_type = other RNA
  modified_base 1: mod_base = OTHER; note = 2'-O-methyl-adenosine
  modified_base 1^2: mod_base = OTHER; note = Phosphorothioate bond
  modified_base 2: mod_base = OTHER; note = 2'-Fluoro-adenosine
  modified_base 2^3: mod_base = OTHER; note = Phosphorothioate bond
  modified_base 3: mod_base = OTHER; note = 2'-O-methyl-adenosine
  modified_base 4: mod_base = OTHER; note = 2'-O-methyl-adenosine
  modified_base 5: mod_base = um
  modified_base 6: mod_base = OTHER; note = 2'-Fluoro-uridine
  modified_base 7: mod_base = um
  modified_base 8: mod_base = OTHER; note = 2'-Fluoro-cytidine
  modified_base 9: mod_base = OTHER; note = 2'-Fluoro-adenosine
  modified_base 10: mod_base = cm
  modified_base 11: mod_base = cm
  modified_base 12: mod_base = OTHER; note = 2'-O-methyl-adenosine
  modified_base 13: mod_base = gm
  modified_base 14: mod_base = OTHER; note = 2'-Fluoro-cytidine
  modified_base 15: mod_base = um
  modified_base 16: mod_base = OTHER; note = 2'-Fluoro-guanosine
  modified_base 17: mod_base = um
  modified_base 18: mod_base = um
  modified_base 19: mod_base = cm
  modified_base 20: mod_base = OTHER; note = 2'-Fluoro-adenosine
  modified_base 21: mod_base = OTHER; note = 2'-O-methyl-adenosine
  modified_base 21^22: mod_base = OTHER; note = Phosphorothioate bond
  modified_base 22: mod_base = cm
  modified_base 22^23: mod_base = OTHER; note = Phosphorothioate bond
  modified_base 23: mod_base = OTHER; note = 2'-O-methyl-adenosine
aaaatttcaccagctgttcaaca

SEQ ID NO: 698 - RNA, 23 nt, synthetic construct
  source 1..23: mol_type = other RNA
  modified_base 1: mod_base = OTHER; note = 2'-O-methyl-adenosine
  modified_base 1^2: mod_base = OTHER; note = Phosphorothioate bond
  modified_base 2: mod_base = OTHER; note = 2'-Fluoro-guanosine
  modified_base 2^3: mod_base = OTHER; note = Phosphorothioate bond
  modified_base 3: mod_base = um
  modified_base 4: mod_base = OTHER; note = 2'-O-methyl-adenosine
  modified_base 5: mod_base = gm
  modified_base 6: mod_base = OTHER; note = 2'-Fluoro-cytidine
  modified_base 7: mod_base = OTHER; note = 2'-O-methyl-adenosine
  modified_base 8: mod_base = OTHER; note = 2'-Fluoro-guanosine
  modified_base 9: mod_base = OTHER; note = 2'-Fluoro-cytidine
  modified_base 10: mod_base = OTHER; note = 2'-O-methyl-adenosine
  modified_base 11: mod_base = OTHER; note = 2'-O-methyl-adenosine
  modified_base 12: mod_base = OTHER; note = 2'-O-methyl-adenosine
  modified_base 13: mod_base = OTHER; note = 2'-O-methyl-adenosine
  modified_base 14: mod_base = OTHER; note = 2'-Fluoro-cytidine
  modified_base 15: mod_base = um
  modified_base 16: mod_base = OTHER; note = 2'-Fluoro-uridine
  modified_base 17: mod_base = um
  modified_base 18: mod_base = cm
  modified_base 19: mod_base = OTHER; note = 2'-O-methyl-adenosine
  modified_base 20: mod_base = OTHER; note = 2'-Fluoro-uridine
  modified_base 21: mod_base = gm
  modified_base 21^22: mod_base = OTHER; note = Phosphorothioate bond
  modified_base 22: mod_base = OTHER; note = 2'-O-methyl-adenosine
  modified_base 22^23: mod_base = OTHER; note = Phosphorothioate bond
  modified_base 23: mod_base = um
agtagcagcaaaactttcatgat

SEQ ID NO: 699 - RNA, 23 nt, synthetic construct
  source 1..23: mol_type = other RNA
  modified_base 1: mod_base = OTHER; note = 2'-O-methyl-adenosine
  modified_base 1^2: mod_base = OTHER; note = Phosphorothioate bond
  modified_base 2: mod_base = OTHER; note = 2'-Fluoro-guanosine
  modified_base 2^3: mod_base = OTHER; note = Phosphorothioate bond
  modified_base 3: mod_base = OTHER; note = 2'-O-methyl-adenosine
  modified_base 4: mod_base = gm
  modified_base 5: mod_base = cm
  modified_base 6: mod_base = OTHER; note = 2'-Fluoro-uridine
  modified_base 7: mod_base = um
  modified_base 8: mod_base = OTHER; note = 2'-Fluoro-guanosine
  modified_base 9: mod_base = OTHER; note = 2'-Fluoro-adenosine
  modified_base 10: mod_base = um
  modified_base 11: mod_base = OTHER; note = 2'-O-methyl-adenosine
  modified_base 12: mod_base = cm
  modified_base 13: mod_base = OTHER; note = 2'-O-methyl-adenosine
  modified_base 14: mod_base = OTHER; note = 2'-Fluoro-uridine
  modified_base 15: mod_base = um
  modified_base 16: mod_base = OTHER; note = 2'-Fluoro-uridine
  modified_base 17: mod_base = um
  modified_base 18: mod_base = cm
  modified_base 19: mod_base = um
  modified_base 20: mod_base = OTHER; note = 2'-Fluoro-guanosine
  modified_base 21: mod_base = gm
  modified_base 21^22: mod_base = OTHER; note = Phosphorothioate bond
  modified_base 22: mod_base = OTHER; note = 2'-O-methyl-adenosine
  modified_base 22^23: mod_base = OTHER; note = Phosphorothioate bond
  modified_base 23: mod_base = OTHER; note = 2'-O-methyl-adenosine
agagcttgatacattttctggaa

SEQ ID NO: 700 - RNA, 23 nt, synthetic construct
  source 1..23: mol_type = other RNA
  modified_base 1: mod_base = OTHER; note = 2'-O-methyl-adenosine
  modified_base 1^2: mod_base = OTHER; note = Phosphorothioate bond
  modified_base 2: mod_base = OTHER; note = 2'-Fluoro-guanosine
  modified_base 2^3: mod_base = OTHER; note = Phosphorothioate bond
  modified_base 3: mod_base = OTHER; note = 2'-O-methyl-adenosine
  modified_base 4: mod_base = um
  modified_base 5: mod_base = um
  modified_base 6: mod_base = OTHER; note = 2'-Fluoro-uridine
  modified_base 7: mod_base = um
  modified_base 8: mod_base = OTHER; note = 2'-Fluoro-adenosine
  modified_base 9: mod_base = OTHER; note = 2'-Fluoro-cytidine
  modified_base 10: mod_base = OTHER; note = 2'-O-methyl-adenosine
  modified_base 11: mod_base = cm
  modified_base 12: mod_base = um
  modified_base 13: mod_base = gm
  modified_base 14: mod_base = OTHER; note = 2'-Fluoro-cytidine
  modified_base 15: mod_base = OTHER; note = 2'-O-methyl-adenosine
  modified_base 16: mod_base = OTHER; note = 2'-Fluoro-guanosine
  modified_base 17: mod_base = um
  modified_base 18: mod_base = gm
  modified_base 19: mod_base = OTHER; note = 2'-O-methyl-adenosine
  modified_base 20: mod_base = OTHER; note = 2'-Fluoro-cytidine
  modified_base 21: mod_base = um
  modified_base 21^22: mod_base = OTHER; note = Phosphorothioate bond
  modified_base 22: mod_base = um
  modified_base 22^23: mod_base = OTHER; note = Phosphorothioate bond
  modified_base 23: mod_base = gm
agattttacactgcagtgacttg

SEQ ID NO: 701 - RNA, 23 nt, synthetic construct
  source 1..23: mol_type = other RNA
  modified_base 1: mod_base = OTHER; note = 2'-O-methyl-adenosine
  modified_base 1^2: mod_base = OTHER; note = Phosphorothioate bond
  modified_base 2: mod_base = OTHER; note = 2'-Fluoro-uridine
  modified_base 2^3: mod_base = OTHER; note = Phosphorothioate bond
  modified_base 3: mod_base = um
  modified_base 4: mod_base = um
  modified_base 5: mod_base = um
  modified_base 6: mod_base = OTHER; note = 2'-Fluoro-cytidine
  modified_base 7: mod_base = um
  modified_base 8: mod_base = OTHER; note = 2'-Fluoro-guanosine
  modified_base 9: mod_base = OTHER; note = 2'-Fluoro-guanosine
  modified_base 10: mod_base = OTHER; note = 2'-O-methyl-adenosine
  modified_base 11: mod_base = OTHER; note = 2'-O-methyl-adenosine
  modified_base 12: mod_base = um
  modified_base 13: mod_base = gm
  modified_base 14: mod_base = OTHER; note = 2'-Fluoro-uridine
  modified_base 15: mod_base = OTHER; note = 2'-O-methyl-adenosine
  modified_base 16: mod_base = OTHER; note = 2'-Fluoro-uridine
  modified_base 17: mod_base = um
  modified_base 18: mod_base = cm
  modified_base 19: mod_base = um
  modified_base 20: mod_base = OTHER; note = 2'-Fluoro-adenosine
  modified_base 21: mod_base = OTHER; note = 2'-O-methyl-adenosine
  modified_base 21^22: mod_base = OTHER; note = Phosphorothioate bond
  modified_base 22: mod_base = gm
  modified_base 22^23: mod_base = OTHER; note = Phosphorothioate bond
  modified_base 23: mod_base = OTHER; note = 2'-O-methyl-adenosine
attttctggaatgtattctaaga

SEQ ID NO: 702 - RNA, 23 nt, synthetic construct
  source 1..23: mol_type = other RNA
  modified_base 1: mod_base = OTHER; note = 2'-O-methyl-adenosine
  modified_base 1^2: mod_base = OTHER; note = Phosphorothioate bond
  modified_base 2: mod_base = OTHER; note = 2'-Fluoro-uridine
  modified_base 2^3: mod_base = OTHER; note = Phosphorothioate bond
  modified_base 3: mod_base = OTHER; note = 2'-O-methyl-adenosine
  modified_base 4: mod_base = um
  modified_base 5: mod_base = OTHER; note = 2'-O-methyl-adenosine
  modified_base 6: mod_base = OTHER; note = 2'-Fluoro-uridine
  modified_base 7: mod_base = OTHER; note = 2'-O-methyl-adenosine
  modified_base 8: mod_base = OTHER; note = 2'-Fluoro-adenosine
  modified_base 9: mod_base = OTHER; note = 2'-Fluoro-adenosine
  modified_base 10: mod_base = cm
  modified_base 11: mod_base = cm
  modified_base 12: mod_base = cm
  modified_base 13: mod_base = OTHER; note = 2'-O-methyl-adenosine
  modified_base 14: mod_base = OTHER; note = 2'-Fluoro-uridine
  modified_base 15: mod_base = gm
  modified_base 16: mod_base = OTHER; note = 2'-Fluoro-guanosine
  modified_base 17: mod_base = OTHER; note = 2'-O-methyl-adenosine
  modified_base 18: mod_base = cm
  modified_base 19: mod_base = um
  modified_base 20: mod_base = OTHER; note = 2'-Fluoro-cytidine
  modified_base 21: mod_base = OTHER; note = 2'-O-methyl-adenosine
  modified_base 21^22: mod_base = OTHER; note = Phosphorothioate bond
  modified_base 22: mod_base = gm
  modified_base 22^23: mod_base = OTHER; note = Phosphorothioate bond
  modified_base 23: mod_base = cm
atatataaacccatggactcagc

SEQ ID NO: 703 - RNA, 23 nt, synthetic construct
  source 1..23: mol_type = other RNA
  modified_base 1: mod_base = OTHER; note = 2'-O-methyl-adenosine
  modified_base 1^2: mod_base = OTHER; note = Phosphorothioate bond
  modified_base 2: mod_base = OTHER; note = 2'-Fluoro-adenosine
  modified_base 2^3: mod_base = OTHER; note = Phosphorothioate bond
  modified_base 3: mod_base = OTHER; note = 2'-O-methyl-adenosine
  modified_base 4: mod_base = gm
  modified_base 5: mod_base = OTHER; note = 2'-O-methyl-adenosine
  modified_base 6: mod_base = OTHER; note = 2'-Fluoro-uridine
  modified_base 7: mod_base = um
  modified_base 8: mod_base = OTHER; note = 2'-Fluoro-guanosine
  modified_base 9: mod_base = OTHER; note = 2'-Fluoro-guanosine
  modified_base 10: mod_base = um
  modified_base 11: mod_base = cm
  modified_base 12: mod_base = um
  modified_base 13: mod_base = cm
  modified_base 14: mod_base = OTHER; note = 2'-Fluoro-uridine
  modified_base 15: mod_base = OTHER; note = 2'-O-methyl-adenosine
  modified_base 16: mod_base = OTHER; note = 2'-Fluoro-guanosine
  modified_base 17: mod_base = cm
  modified_base 18: mod_base = cm
  modified_base 19: mod_base = gm
  modified_base 20: mod_base = OTHER; note = 2'-Fluoro-adenosine
  modified_base 21: mod_base = um
  modified_base 21^22: mod_base = OTHER; note = Phosphorothioate bond
  modified_base 22: mod_base = cm
  modified_base 22^23: mod_base = OTHER; note = Phosphorothioate bond
  modified_base 23: mod_base = gm
aaagattggtctctagccgatcg

SEQ ID NO: 704 - RNA, 23 nt, synthetic construct
  source 1..23: mol_type = other RNA
  modified_base 1: mod_base = gm
  modified_base 1^2: mod_base = OTHER; note = Phosphorothioate bond
  modified_base 2: mod_base = OTHER; note = 2'-Fluoro-uridine
  modified_base 2^3: mod_base = OTHER; note = Phosphorothioate bond
  modified_base 3: mod_base = cm
  modified_base 4: mod_base = um
  modified_base 5: mod_base = um
  modified_base 6: mod_base = OTHER; note = 2'-Fluoro-uridine
  modified_base 7: mod_base = OTHER; note = 2'-O-methyl-adenosine
  modified_base 8: mod_base = OTHER; note = 2'-Fluoro-uridine
  modified_base 9: mod_base = OTHER; note = 2'-Fluoro-cytidine
  modified_base 10: mod_base = OTHER; note = 2'-O-methyl-adenosine
  modified_base 11: mod_base = um
  modified_base 12: mod_base = cm
  modified_base 13: mod_base = cm
  modified_base 14: mod_base = OTHER; note = 2'-Fluoro-adenosine
  modified_base 15: mod_base = um
  modified_base 16: mod_base = OTHER; note = 2'-Fluoro-adenosine
  modified_base 17: mod_base = OTHER; note = 2'-O-methyl-adenosine
  modified_base 18: mod_base = OTHER; note = 2'-O-methyl-adenosine
  modified_base 19: mod_base = gm
  modified_base 20: mod_base = OTHER; note = 2'-Fluoro-guanosine
  modified_base 21: mod_base = OTHER; note = 2'-O-methyl-adenosine
  modified_base 21^22: mod_base = OTHER; note = Phosphorothioate bond
  modified_base 22: mod_base = OTHER; note = 2'-O-methyl-adenosine
  modified_base 22^23: mod_base = OTHER; note = Phosphorothioate bond
  modified_base 23: mod_base = OTHER; note = 2'-O-methyl-adenosine
gtctttatcatccataaaggaaa

SEQ ID NO: 705 - RNA, 23 nt, synthetic construct
  source 1..23: mol_type = other RNA
  modified_base 1: mod_base = OTHER; note = 2'-O-methyl-adenosine
  modified_base 1^2: mod_base = OTHER; note = Phosphorothioate bond
  modified_base 2: mod_base = OTHER; note = 2'-Fluoro-adenosine
  modified_base 2^3: mod_base = OTHER; note = Phosphorothioate bond
  modified_base 3: mod_base = OTHER; note = 2'-O-methyl-adenosine
  modified_base 4: mod_base = um
  modified_base 5: mod_base = um
  modified_base 6: mod_base = OTHER; note = 2'-Fluoro-uridine
  modified_base 7: mod_base = cm
  modified_base 8: mod_base = OTHER; note = 2'-Fluoro-adenosine
  modified_base 9: mod_base = OTHER; note = 2'-Fluoro-cytidine
  modified_base 10: mod_base = cm
  modified_base 11: mod_base = OTHER; note = 2'-O-methyl-adenosine
  modified_base 12: mod_base = gm
  modified_base 13: mod_base = cm
  modified_base 14: mod_base = OTHER; note = 2'-Fluoro-uridine
  modified_base 15: mod_base = gm
  modified_base 16: mod_base = OTHER; note = 2'-Fluoro-uridine
  modified_base 17: mod_base = um
  modified_base 18: mod_base = cm
  modified_base 19: mod_base = OTHER; note = 2'-O-methyl-adenosine
  modified_base 20: mod_base = OTHER; note = 2'-Fluoro-adenosine
  modified_base 21: mod_base = cm
  modified_base 21^22: mod_base = OTHER; note = Phosphorothioate bond
  modified_base 22: mod_base = OTHER; note = 2'-O-methyl-adenosine
  modified_base 22^23: mod_base = OTHER; note = Phosphorothioate bond
  modified_base 23: mod_base = um
aaatttcaccagctgttcaacat

SEQ ID NO: 706 - RNA, 23 nt, synthetic construct
  source 1..23: mol_type = other RNA
  modified_base 1: mod_base = um
  modified_base 1^2: mod_base = OTHER; note = Phosphorothioate bond
  modified_base 2: mod_base = OTHER; note = 2'-Fluoro-adenosine
  modified_base 2^3: mod_base = OTHER; note = Phosphorothioate bond
  modified_base 3: mod_base = OTHER; note = 2'-O-methyl-adenosine
  modified_base 4: mod_base = OTHER; note = 2'-O-methyl-adenosine
  modified_base 5: mod_base = gm
  modified_base 6: mod_base = OTHER; note = 2'-Fluoro-uridine
  modified_base 7: mod_base = OTHER; note = 2'-O-methyl-adenosine
  modified_base 8: mod_base = OTHER; note = 2'-Fluoro-guanosine
  modified_base 9: mod_base = OTHER; note = 2'-Fluoro-adenosine
  modified_base 10: mod_base = gm
  modified_base 11: mod_base = cm
  modified_base 12: mod_base = um
  modified_base 13: mod_base = um
  modified_base 14: mod_base = OTHER; note = 2'-Fluoro-guanosine
  modified_base 15: mod_base = OTHER; note = 2'-O-methyl-adenosine
  modified_base 16: mod_base = OTHER; note = 2'-Fluoro-uridine
  modified_base 17: mod_base = OTHER; note = 2'-O-methyl-adenosine
  modified_base 18: mod_base = cm
  modified_base 19: mod_base = OTHER; note = 2'-O-methyl-adenosine
  modified_base 20: mod_base = OTHER; note = 2'-Fluoro-uridine
  modified_base 21: mod_base = um
  modified_base 21^22: mod_base = OTHER; note = Phosphorothioate bond
  modified_base 22: mod_base = um
  modified_base 22^23: mod_base = OTHER; note = Phosphorothioate bond
  modified_base 23: mod_base = um
taaagtagagcttgatacatttt

SEQ ID NO: 707 - RNA, 23 nt, synthetic construct
  source 1..23: mol_type = other RNA
  modified_base 1: mod_base = OTHER; note = 2'-O-methyl-adenosine
  modified_base 1^2: mod_base = OTHER; note = Phosphorothioate bond
  modified_base 2: mod_base = OTHER; note = 2'-Fluoro-adenosine
  modified_base 2^3: mod_base = OTHER; note = Phosphorothioate bond
  modified_base 3: mod_base = um
  modified_base 4: mod_base = OTHER; note = 2'-O-methyl-adenosine
  modified_base 5: mod_base = gm
  modified_base 6: mod_base = OTHER; note = 2'-Fluoro-uridine
  modified_base 7: mod_base = cm
  modified_base 8: mod_base = OTHER; note = 2'-Fluoro-uridine
  modified_base 9: mod_base = OTHER; note = 2'-Fluoro-uridine
  modified_base 10: mod_base = um
  modified_base 11: mod_base = OTHER; note = 2'-O-methyl-adenosine
  modified_base 12: mod_base = um
  modified_base 13: mod_base = cm
  modified_base 14: mod_base = OTHER; note = 2'-Fluoro-adenosine
  modified_base 15: mod_base = um
  modified_base 16: mod_base = OTHER; note = 2'-Fluoro-cytidine
  modified_base 17: mod_base = cm
  modified_base 18: mod_base = OTHER; note = 2'-O-methyl-adenosine
  modified_base 19: mod_base = um
  modified_base 20: mod_base = OTHER; note = 2'-Fluoro-adenosine
  modified_base 21: mod_base = OTHER; note = 2'-O-methyl-adenosine
  modified_base 21^22: mod_base = OTHER; note = Phosphorothioate bond
  modified_base 22: mod_base = OTHER; note = 2'-O-methyl-adenosine
  modified_base 22^23: mod_base = OTHER; note = Phosphorothioate bond
  modified_base 23: mod_base = gm
aatagtctttatcatccataaag

SEQ ID NO: 708 - RNA, 23 nt, synthetic construct
  source 1..23: mol_type = other RNA
  modified_base 1: mod_base = OTHER; note = 2'-O-methyl-adenosine
  modified_base 1^2: mod_base = OTHER; note = Phosphorothioate bond
  modified_base 2: mod_base = OTHER; note = 2'-Fluoro-adenosine
  modified_base 2^3: mod_base = OTHER; note = Phosphorothioate bond
  modified_base 3: mod_base = um
  modified_base 4: mod_base = um
  modified_base 5: mod_base = um
  modified_base 6: mod_base = OTHER; note = 2'-Fluoro-adenosine
  modified_base 7: mod_base = um
  modified_base 8: mod_base = OTHER; note = 2'-Fluoro-uridine
  modified_base 9: mod_base = OTHER; note = 2'-Fluoro-uridine
  modified_base 10: mod_base = um
  modified_base 11: mod_base = gm
  modified_base 12: mod_base = cm
  modified_base 13: mod_base = um
  modified_base 14: mod_base = OTHER; note = 2'-Fluoro-adenosine
  modified_base 15: mod_base = um
  modified_base 16: mod_base = OTHER; note = 2'-Fluoro-uridine
  modified_base 17: mod_base = um
  modified_base 18: mod_base = cm
  modified_base 19: mod_base = cm
  modified_base 20: mod_base = OTHER; note = 2'-Fluoro-uridine
  modified_base 21: mod_base = cm
  modified_base 21^22: mod_base = OTHER; note = Phosphorothioate bond
  modified_base 22: mod_base = cm
  modified_base 22^23: mod_base = OTHER; note = Phosphorothioate bond
  modified_base 23: mod_base = um
aatttattttgctatttcctcct

SEQ ID NO: 709 - RNA, 23 nt, synthetic construct
  source 1..23: mol_type = other RNA
  modified_base 1: mod_base = OTHER; note = 2'-O-methyl-adenosine
  modified_base 1^2: mod_base = OTHER; note = Phosphorothioate bond
  modified_base 2: mod_base = OTHER; note = 2'-Fluoro-uridine
  modified_base 2^3: mod_base = OTHER; note = Phosphorothioate bond
  modified_base 3: mod_base = cm
  modified_base 4: mod_base = um
  modified_base 5: mod_base = um
  modified_base 6: mod_base = OTHER; note = 2'-Fluoro-adenosine
  modified_base 7: mod_base = um
  modified_base 8: mod_base = OTHER; note = 2'-Fluoro-cytidine
  modified_base 9: mod_base = OTHER; note = 2'-Fluoro-adenosine
  modified_base 10: mod_base = OTHER; note = 2'-O-methyl-adenosine
  modified_base 11: mod_base = um
  modified_base 12: mod_base = gm
  modified_base 13: mod_base = OTHER; note = 2'-O-methyl-adenosine
  modified_base 14: mod_base = OTHER; note = 2'-Fluoro-uridine
  modified_base 15: mod_base = gm
  modified_base 16: mod_base = OTHER; note = 2'-Fluoro-cytidine
  modified_base 17: mod_base = OTHER; note = 2'-O-methyl-adenosine
  modified_base 18: mod_base = OTHER; note = 2'-O-methyl-adenosine
  modified_base 19: mod_base = um
  modified_base 20: mod_base = OTHER; note = 2'-Fluoro-cytidine
  modified_base 21: mod_base = OTHER; note = 2'-O-methyl-adenosine
  modified_base 21^22: mod_base = OTHER; note = Phosphorothioate bond
  modified_base 22: mod_base = um
  modified_base 22^23: mod_base = OTHER; note = Phosphorothioate bond
  modified_base 23: mod_base = um
atcttatcaatgatgcaatcatt

SEQ ID NO: 710 - RNA, 23 nt, synthetic construct
  source 1..23: mol_type = other RNA
  modified_base 1: mod_base = gm
  modified_base 1^2: mod_base = OTHER; note = Phosphorothioate bond
  modified_base 2: mod_base = OTHER; note = 2'-Fluoro-uridine
  modified_base 2^3: mod_base = OTHER; note = Phosphorothioate bond
  modified_base 3: mod_base = OTHER; note = 2'-O-methyl-adenosine
  modified_base 4: mod_base = gm
  modified_base 5: mod_base = cm
  modified_base 6: mod_base = OTHER; note = 2'-Fluoro-adenosine
  modified_base 7: mod_base = gm
  modified_base 8: mod_base = OTHER; note = 2'-Fluoro-cytidine
  modified_base 9: mod_base = OTHER; note = 2'-Fluoro-adenosine
  modified_base 10: mod_base = OTHER; note = 2'-O-methyl-adenosine
  modified_base 11: mod_base = OTHER; note = 2'-O-methyl-adenosine
  modified_base 12: mod_base = OTHER; note = 2'-O-methyl-adenosine
  modified_base 13: mod_base = cm
  modified_base 14: mod_base = OTHER; note = 2'-Fluoro-uridine
  modified_base 15: mod_base = um
  modified_base 16: mod_base = OTHER; note = 2'-Fluoro-uridine
  modified_base 17: mod_base = cm
  modified_base 18: mod_base = OTHER; note = 2'-O-methyl-adenosine
  modified_base 19: mod_base = um
  modified_base 20: mod_base = OTHER; note = 2'-Fluoro-guanosine
  modified_base 21: mod_base = OTHER; note = 2'-O-methyl-adenosine
  modified_base 21^22: mod_base = OTHER; note = Phosphorothioate bond
  modified_base 22: mod_base = um
  modified_base 22^23: mod_base = OTHER; note = Phosphorothioate bond
  modified_base 23: mod_base = gm
gtagcagcaaaactttcatgatg

SEQ ID NO: 711 - RNA, 23 nt, synthetic construct
  source 1..23: mol_type = other RNA
  modified_base 1: mod_base = OTHER; note = 2'-O-methyl-adenosine
  modified_base 1^2: mod_base = OTHER; note = Phosphorothioate bond
  modified_base 2: mod_base = OTHER; note = 2'-Fluoro-adenosine
  modified_base 2^3: mod_base = OTHER; note = Phosphorothioate bond
  modified_base 3: mod_base = um
  modified_base 4: mod_base = cm
  modified_base 5: mod_base = OTHER; note = 2'-O-methyl-adenosine
  modified_base 6: mod_base = OTHER; note = 2'-Fluoro-uridine
  modified_base 7: mod_base = um
  modified_base 8: mod_base = OTHER; note = 2'-Fluoro-uridine
  modified_base 9: mod_base = OTHER; note = 2'-Fluoro-cytidine
  modified_base 10: mod_base = um
  modified_base 11: mod_base = um
  modified_base 12: mod_base = cm
  modified_base 13: mod_base = cm
  modified_base 14: mod_base = OTHER; note = 2'-Fluoro-adenosine
  modified_base 15: mod_base = gm
  modified_base 16: mod_base = OTHER; note = 2'-Fluoro-cytidine
  modified_base 17: mod_base = OTHER; note = 2'-O-methyl-adenosine
  modified_base 18: mod_base = cm
  modified_base 19: mod_base = OTHER; note = 2'-O-methyl-adenosine
  modified_base 20: mod_base = OTHER; note = 2'-Fluoro-uridine
  modified_base 21: mod_base = OTHER; note = 2'-O-methyl-adenosine
  modified_base 21^22: mod_base = OTHER; note = Phosphorothioate bond
  modified_base 22: mod_base = OTHER; note = 2'-O-methyl-adenosine
  modified_base 22^23: mod_base = OTHER; note = Phosphorothioate bond
  modified_base 23: mod_base = OTHER; note = 2'-O-methyl-adenosine
aatcatttcttccagcacataaa

SEQ ID NO: 712 - RNA, 23 nt, synthetic construct
  source 1..23: mol_type = other RNA
  modified_base 1: mod_base = OTHER; note = 2'-O-methyl-adenosine
  modified_base 1^2: mod_base = OTHER; note = Phosphorothioate bond
  modified_base 2: mod_base = OTHER; note = 2'-Fluoro-uridine
  modified_base 2^3: mod_base = OTHER; note = Phosphorothioate bond
  modified_base 3: mod_base = OTHER; note = 2'-O-methyl-adenosine
  modified_base 4: mod_base = gm
  modified_base 5: mod_base = gm
  modified_base 6: mod_base = OTHER; note = 2'-Fluoro-adenosine
  modified_base 7: mod_base = OTHER; note = 2'-O-methyl-adenosine
  modified_base 8: mod_base = OTHER; note = 2'-Fluoro-uridine
  modified_base 9: mod_base = OTHER; note = 2'-Fluoro-adenosine
  modified_base 10: mod_base = gm
  modified_base 11: mod_base = um
  modified_base 12: mod_base = cm
  modified_base 13: mod_base = OTHER; note = 2'-O-methyl-adenosine
  modified_base 14: mod_base = OTHER; note = 2'-Fluoro-guanosine
  modified_base 15: mod_base = cm
  modified_base 16: mod_base = OTHER; note = 2'-Fluoro-adenosine
  modified_base 17: mod_base = um
  modified_base 18: mod_base = cm
  modified_base 19: mod_base = um
  modified_base 20: mod_base = OTHER; note = 2'-Fluoro-cytidine
  modified_base 21: mod_base = um
  modified_base 21^22: mod_base = OTHER; note = Phosphorothioate bond
  modified_base 22: mod_base = um
  modified_base 22^23: mod_base = OTHER; note = Phosphorothioate bond
  modified_base 23: mod_base = OTHER; note = 2'-O-methyl-adenosine
ataggaatagtcagcatctctta

SEQ ID NO: 713 - RNA, 23 nt, synthetic construct
  source 1..23: mol_type = other RNA
  modified_base 1: mod_base = um
  modified_base 1^2: mod_base = OTHER; note = Phosphorothioate bond
  modified_base 2: mod_base = OTHER; note = 2'-Fluoro-guanosine
  modified_base 2^3: mod_base = OTHER; note = Phosphorothioate bond
  modified_base 3: mod_base = um
  modified_base 4: mod_base = OTHER; note = 2'-O-methyl-adenosine
  modified_base 5: mod_base = gm
  modified_base 6: mod_base = OTHER; note = 2'-Fluoro-adenosine
  modified_base 7: mod_base = OTHER; note = 2'-O-methyl-adenosine
  modified_base 8: mod_base = OTHER; note = 2'-Fluoro-guanosine
  modified_base 9: mod_base = OTHER; note = 2'-Fluoro-cytidine
  modified_base 10: mod_base = OTHER; note = 2'-O-methyl-adenosine
  modified_base 11: mod_base = gm
  modified_base 12: mod_base = OTHER; note = 2'-O-methyl-adenosine
  modified_base 13: mod_base = OTHER; note = 2'-O-methyl-adenosine
  modified_base 14: mod_base = OTHER; note = 2'-Fluoro-uridine
  modified_base 15: mod_base = um
  modified_base 16: mod_base = OTHER; note = 2'-Fluoro-cytidine
  modified_base 17: mod_base = cm
  modified_base 18: mod_base = OTHER; note = 2'-O-methyl-adenosine
  modified_base 19: mod_base = gm
  modified_base 20: mod_base = OTHER; note = 2'-Fluoro-cytidine
  modified_base 21: mod_base = OTHER; note = 2'-O-methyl-adenosine
  modified_base 21^22: mod_base = OTHER; note = Phosphorothioate bond
  modified_base 22: mod_base = gm
  modified_base 22^23: mod_base = OTHER; note = Phosphorothioate bond
  modified_base 23: mod_base = gm
tgtagaagcagaattccagcagg

SEQ ID NO: 714 - RNA, 23 nt, synthetic construct
  source 1..23: mol_type = other RNA
  modified_base 1: mod_base = gm
  modified_base 1^2: mod_base = OTHER; note = Phosphorothioate bond
  modified_base 2: mod_base = OTHER; note = 2'-Fluoro-guanosine
  modified_base 2^3: mod_base = OTHER; note = Phosphorothioate bond
  modified_base 3: mod_base = OTHER; note = 2'-O-methyl-adenosine
  modified_base 4: mod_base = OTHER; note = 2'-O-methyl-adenosine
  modified_base 5: mod_base = um
  modified_base 6: mod_base = OTHER; note = 2'-Fluoro-adenosine
  modified_base 7: mod_base = gm
  modified_base 8: mod_base = OTHER; note = 2'-Fluoro-uridine
  modified_base 9: mod_base = OTHER; note = 2'-Fluoro-cytidine
  modified_base 10: mod_base = OTHER; note = 2'-O-methyl-adenosine
  modified_base 11: mod_base = gm
  modified_base 12: mod_base = cm
  modified_base 13: mod_base = OTHER; note = 2'-O-methyl-adenosine
  modified_base 14: mod_base = OTHER; note = 2'-Fluoro-uridine
  modified_base 15: mod_base = cm
  modified_base 16: mod_base = OTHER; note = 2'-Fluoro-uridine
  modified_base 17: mod_base = cm
  modified_base 18: mod_base = um
  modified_base 19: mod_base = um
  modified_base 20: mod_base = OTHER; note = 2'-Fluoro-adenosine
  modified_base 21: mod_base = cm
  modified_base 21^22: mod_base = OTHER; note = Phosphorothioate bond
  modified_base 22: mod_base = OTHER; note = 2'-O-methyl-adenosine
  modified_base 22^23: mod_base = OTHER; note = Phosphorothioate bond
  modified_base 23: mod_base = gm
ggaatagtcagcatctcttacag

SEQ ID NO: 715 - RNA, 23 nt, synthetic construct
  source 1..23: mol_type = other RNA
  modified_base 1: mod_base = um
  modified_base 1^2: mod_base = OTHER; note = Phosphorothioate bond
  modified_base 2: mod_base = OTHER; note = 2'-Fluoro-uridine
  modified_base 2^3: mod_base = OTHER; note = Phosphorothioate bond
  modified_base 3: mod_base = OTHER; note = 2'-O-methyl-adenosine
  modified_base 4: mod_base = um
  modified_base 5: mod_base = um
  modified_base 6: mod_base = OTHER; note = 2'-Fluoro-uridine
  modified_base 7: mod_base = um
  modified_base 8: mod_base = OTHER; note = 2'-Fluoro-guanosine
  modified_base 9: mod_base = OTHER; note = 2'-Fluoro-cytidine
  modified_base 10: mod_base = um
  modified_base 11: mod_base = OTHER; note = 2'-O-methyl-adenosine
  modified_base 12: mod_base = um
  modified_base 13: mod_base = um
  modified_base 14: mod_base = OTHER; note = 2'-Fluoro-uridine
  modified_base 15: mod_base = cm
  modified_base 16: mod_base = OTHER; note = 2'-Fluoro-cytidine
  modified_base 17: mod_base = um
  modified_base 18: mod_base = cm
  modified_base 19: mod_base = cm
  modified_base 20: mod_base = OTHER; note = 2'-Fluoro-uridine
  modified_base 21: mod_base = OTHER; note = 2'-O-methyl-adenosine
  modified_base 21^22: mod_base = OTHER; note = Phosphorothioate bond
  modified_base 22: mod_base = gm
  modified_base 22^23: mod_base = OTHER; note = Phosphorothioate bond
  modified_base 23: mod_base = OTHER; note = 2'-O-methyl-adenosine
ttattttgctatttcctcctaga

SEQ ID NO: 716 - RNA, 23 nt, synthetic construct
  source 1..23: mol_type = other RNA
  modified_base 1: mod_base = OTHER; note = 2'-O-methyl-adenosine
  modified_base 1^2: mod_base = OTHER; note = Phosphorothioate bond
  modified_base 2: mod_base = OTHER; note = 2'-Fluoro-guanosine
  modified_base 2^3: mod_base = OTHER; note = Phosphorothioate bond
  modified_base 3: mod_base = cm
  modified_base 4: mod_base = OTHER; note = 2'-O-methyl-adenosine
  modified_base 5: mod_base = OTHER; note = 2'-O-methyl-adenosine
  modified_base 6: mod_base = OTHER; note = 2'-Fluoro-adenosine
  modified_base 7: mod_base = OTHER; note = 2'-O-methyl-adenosine
  modified_base 8: mod_base = OTHER; note = 2'-Fluoro-cytidine
  modified_base 9: mod_base = OTHER; note = 2'-Fluoro-uridine
  modified_base 10: mod_base = um
  modified_base 11: mod_base = um
  modified_base 12: mod_base = cm
  modified_base 13: mod_base = OTHER; note = 2'-O-methyl-adenosine
  modified_base 14: mod_base = OTHER; note = 2'-Fluoro-uridine
  modified_base 15: mod_base = gm
  modified_base 16: mod_base = OTHER; note = 2'-Fluoro-adenosine
  modified_base 17: mod_base = um
  modified_base 18: mod_base = gm
  modified_base 19: mod_base = gm
  modified_base 20: mod_base = OTHER; note = 2'-Fluoro-uridine
  modified_base 21: mod_base = gm
  modified_base 21^22: mod_base = OTHER; note = Phosphorothioate bond
  modified_base 22: mod_base = um
  modified_base 22^23: mod_base = OTHER; note = Phosphorothioate bond
  modified_base 23: mod_base = OTHER; note = 2'-O-methyl-adenosine
agcaaaactttcatgatggtgta

SEQ ID NO: 717 - RNA, 23 nt, synthetic construct
  source 1..23: mol_type = other RNA
  modified_base 1: mod_base = OTHER; note = 2'-O-methyl-adenosine
  modified_base 1^2: mod_base = OTHER; note = Phosphorothioate bond
  modified_base 2: mod_base = OTHER; note = 2'-Fluoro-adenosine
  modified_base 2^3: mod_base = OTHER; note = Phosphorothioate bond
  modified_base 3: mod_base = um
  modified_base 4: mod_base = gm
  modified_base 5: mod_base = um
  modified_base 6: mod_base = OTHER; note = 2'-Fluoro-adenosine
  modified_base 7: mod_base = um
  modified_base 8: mod_base = OTHER; note = 2'-Fluoro-uridine
  modified_base 9: mod_base = OTHER; note = 2'-Fluoro-cytidine
  modified_base 10: mod_base = um
  modified_base 11: mod_base = OTHER; note = 2'-O-methyl-adenosine
  modified_base 12: mod_base = OTHER; note = 2'-O-methyl-adenosine
  modified_base 13: mod_base = gm
  modified_base 14: mod_base = OTHER; note = 2'-Fluoro-adenosine
  modified_base 15: mod_base = cm
  modified_base 16: mod_base = OTHER; note = 2'-Fluoro-cytidine
  modified_base 17: mod_base = gm
  modified_base 18: mod_base = gm
  modified_base 19: mod_base = OTHER; note = 2'-O-methyl-adenosine
  modified_base 20: mod_base = OTHER; note = 2'-Fluoro-uridine
  modified_base 21: mod_base = OTHER; note = 2'-O-methyl-adenosine
  modified_base 21^22: mod_base = OTHER; note = Phosphorothioate bond
  modified_base 22: mod_base = cm
  modified_base 22^23: mod_base = OTHER; note = Phosphorothioate bond
  modified_base 23: mod_base = cm
aatgtattctaagaccggatacc

SEQ ID NO: 718 - RNA, 23 nt, synthetic construct
  source 1..23: mol_type = other RNA
  modified_base 1: mod_base = OTHER; note = 2'-O-methyl-adenosine
  modified_base 1^2: mod_base = OTHER; note = Phosphorothioate bond
  modified_base 2: mod_base = OTHER; note = 2'-Fluoro-uridine
  modified_base 2^3: mod_base = OTHER; note = Phosphorothioate bond
  modified_base 3: mod_base = um
  modified_base 4: mod_base = um
  modified_base 5: mod_base = cm
  modified_base 6: mod_base = OTHER; note = 2'-Fluoro-adenosine
  modified_base 7: mod_base = um
  modified_base 8: mod_base = OTHER; note = 2'-Fluoro-guanosine
  modified_base 9: mod_base = OTHER; note = 2'-Fluoro-cytidine
  modified_base 10: mod_base = um
  modified_base 11: mod_base = OTHER; note = 2'-O-methyl-adenosine
  modified_base 12: mod_base = cm
  modified_base 13: mod_base = um
  modified_base 14: mod_base = OTHER; note = 2'-Fluoro-uridine
  modified_base 15: mod_base = OTHER; note = 2'-O-methyl-adenosine
  modified_base 16: mod_base = OTHER; note = 2'-Fluoro-adenosine
  modified_base 17: mod_base = cm
  modified_base 18: mod_base = gm
  modified_base 19: mod_base = gm
  modified_base 20: mod_base = OTHER; note = 2'-Fluoro-adenosine
  modified_base 21: mod_base = cm
  modified_base 21^22: mod_base = OTHER; note = Phosphorothioate bond
  modified_base 22: mod_base = um
  modified_base 22^23: mod_base = OTHER; note = Phosphorothioate bond
  modified_base 23: mod_base = um
atttcatgctacttaacggactt

SEQ ID NO: 719 - RNA, 23 nt, synthetic construct
  source 1..23: mol_type = other RNA
  modified_base 1: mod_base = gm
  modified_base 1^2: mod_base = OTHER; note = Phosphorothioate bond
  modified_base 2: mod_base = OTHER; note = 2'-Fluoro-guanosine
  modified_base 2^3: mod_base = OTHER; note = Phosphorothioate bond
  modified_base 3: mod_base = OTHER; note = 2'-O-methyl-adenosine
  modified_base 4: mod_base = gm
  modified_base 5: mod_base = OTHER; note = 2'-O-methyl-adenosine
  modified_base 6: mod_base = OTHER; note = 2'-Fluoro-uridine
  modified_base 7: mod_base = um
  modified_base 8: mod_base = OTHER; note = 2'-Fluoro-uridine
  modified_base 9: mod_base = OTHER; note = 2'-Fluoro-uridine
  modified_base 10: mod_base = OTHER; note = 2'-O-methyl-adenosine
  modified_base 11: mod_base = cm
  modified_base 12: mod_base = OTHER; note = 2'-O-methyl-adenosine
  modified_base 13: mod_base = cm
  modified_base 14: mod_base = OTHER; note = 2'-Fluoro-uridine
  modified_base 15: mod_base = gm
  modified_base 16: mod_base = OTHER; note = 2'-Fluoro-cytidine
  modified_base 17: mod_base = OTHER; note = 2'-O-methyl-adenosine
  modified_base 18: mod_base = gm
  modified_base 19: mod_base = um
  modified_base 20: mod_base = OTHER; note = 2'-Fluoro-guanosine
  modified_base 21: mod_base = OTHER; note = 2'-O-methyl-adenosine
  modified_base 21^22: mod_base = OTHER; note = Phosphorothioate bond
  modified_base 22: mod_base = cm
  modified_base 22^23: mod_base = OTHER; note = Phosphorothioate bond
  modified_base 23: mod_base = um
ggagattttacactgcagtgact

SEQ ID NO: 720 - RNA, 23 nt, synthetic construct
  source 1..23: mol_type = other RNA
  modified_base 1: mod_base = OTHER; note = 2'-O-methyl-adenosine
  modified_base 1^2: mod_base = OTHER; note = Phosphorothioate bond
  modified_base 2: mod_base = OTHER; note = 2'-Fluoro-adenosine
  modified_base 2^3: mod_base = OTHER; note = Phosphorothioate bond
  modified_base 3: mod_base = um
  modified_base 4: mod_base = OTHER; note = 2'-O-methyl-adenosine
  modified_base 5: mod_base = gm
  modified_base 6: mod_base = OTHER; note = 2'-Fluoro-uridine
  modified_base 7: mod_base = cm
  modified_base 8: mod_base = OTHER; note = 2'-Fluoro-adenosine
  modified_base 9: mod_base = OTHER; note = 2'-Fluoro-guanosine
  modified_base 10: mod_base = cm
  modified_base 11: mod_base = OTHER; note = 2'-O-methyl-adenosine
  modified_base 12: mod_base = um
  modified_base 13: mod_base = cm
  modified_base 14: mod_base = OTHER; note = 2'-Fluoro-uridine
  modified_base 15: mod_base = cm
  modified_base 16: mod_base = OTHER; note = 2'-Fluoro-uridine
  modified_base 17: mod_base = um
  modified_base 18: mod_base = OTHER; note = 2'-O-methyl-adenosine
  modified_base 19: mod_base = cm
  modified_base 20: mod_base = OTHER; note = 2'-Fluoro-adenosine
  modified_base 21: mod_base = gm
  modified_base 21^22: mod_base = OTHER; note = Phosphorothioate bond
  modified_base 22: mod_base = OTHER; note = 2'-O-methyl-adenosine
  modified_base 22^23: mod_base = OTHER; note = Phosphorothioate bond
  modified_base 23: mod_base = OTHER; note = 2'-O-methyl-adenosine
aatagtcagcatctcttacagaa

SEQ ID NO: 721 - RNA, 23 nt, synthetic construct
  source 1..23: mol_type = other RNA
  modified_base 1: mod_base = um
  modified_base 1^2: mod_base = OTHER; note = Phosphorothioate bond
  modified_base 2: mod_base = OTHER; note = 2'-Fluoro-adenosine
  modified_base 2^3: mod_base = OTHER; note = Phosphorothioate bond
  modified_base 3: mod_base = gm
  modified_base 4: mod_base = um
  modified_base 5: mod_base = cm
  modified_base 6: mod_base = OTHER; note = 2'-Fluoro-uridine
  modified_base 7: mod_base = um
  modified_base 8: mod_base = OTHER; note = 2'-Fluoro-uridine
  modified_base 9: mod_base = OTHER; note = 2'-Fluoro-adenosine
  modified_base 10: mod_base = um
  modified_base 11: mod_base = cm
  modified_base 12: mod_base = OTHER; note = 2'-O-methyl-adenosine
  modified_base 13: mod_base = um
  modified_base 14: mod_base = OTHER; note = 2'-Fluoro-cytidine
  modified_base 15: mod_base = cm
  modified_base 16: mod_base = OTHER; note = 2'-Fluoro-adenosine
  modified_base 17: mod_base = um
  modified_base 18: mod_base = OTHER; note = 2'-O-methyl-adenosine
  modified_base 19: mod_base = OTHER; note = 2'-O-methyl-adenosine
  modified_base 20: mod_base = OTHER; note = 2'-Fluoro-adenosine
  modified_base 21: mod_base = gm
  modified_base 21^22: mod_base = OTHER; note = Phosphorothioate bond
  modified_base 22: mod_base = gm
  modified_base 22^23: mod_base = OTHER; note = Phosphorothioate bond
  modified_base 23: mod_base = OTHER; note = 2'-O-methyl-adenosine
tagtctttatcatccataaagga

SEQ ID NO: 722 - RNA, 23 nt, synthetic construct
  source 1..23: mol_type = other RNA
  modified_base 1: mod_base = OTHER; note = 2'-O-methyl-adenosine
  modified_base 1^2: mod_base = OTHER; note = Phosphorothioate bond
  modified_base 2: mod_base = OTHER; note = 2'-Fluoro-cytidine
  modified_base 2^3: mod_base = OTHER; note = Phosphorothioate bond
  modified_base 3: mod_base = OTHER; note = 2'-O-methyl-adenosine
  modified_base 4: mod_base = gm
  modified_base 5: mod_base = OTHER; note = 2'-O-methyl-adenosine
  modified_base 6: mod_base = OTHER; note = 2'-Fluoro-adenosine
  modified_base 7: mod_base = um
  modified_base 8: mod_base = OTHER; note = 2'-Fluoro-cytidine
  modified_base 9: mod_base = OTHER; note = 2'-Fluoro-cytidine
  modified_base 10: mod_base = OTHER; note = 2'-O-methyl-adenosine
  modified_base 11: mod_base = um
  modified_base 12: mod_base = OTHER; note = 2'-O-methyl-adenosine
  modified_base 13: mod_base = um
  modified_base 14: mod_base = OTHER; note = 2'-Fluoro-adenosine
  modified_base 15: mod_base = um
  modified_base 16: mod_base = OTHER; note = 2'-Fluoro-adenosine
  modified_base 17: mod_base = OTHER; note = 2'-O-methyl-adenosine
  modified_base 18: mod_base = OTHER; note = 2'-O-methyl-adenosine
  modified_base 19: mod_base = cm
  modified_base 20: mod_base = OTHER; note = 2'-Fluoro-cytidine
  modified_base 21: mod_base = cm
  modified_base 21^22: mod_base = OTHER; note = Phosphorothioate bond
  modified_base 22: mod_base = OTHER; note = 2'-O-methyl-adenosine
  modified_base 22^23: mod_base = OTHER; note = Phosphorothioate bond
  modified_base 23: mod_base = um
acagaatccatatataaacccat

SEQ ID NO: 723 - RNA, 23 nt, synthetic construct
  source 1..23: mol_type = other RNA
  modified_base 1: mod_base = um
  modified_base 1^2: mod_base = OTHER; note = Phosphorothioate bond
  modified_base 2: mod_base = OTHER; note = 2'-Fluoro-guanosine
  modified_base 2^3: mod_base = OTHER; note = Phosphorothioate bond
  modified_base 3: mod_base = cm
  modified_base 4: mod_base = um
  modified_base 5: mod_base = OTHER; note = 2'-O-methyl-adenosine
  modified_base 6: mod_base = OTHER; note = 2'-Fluoro-cytidine
  modified_base 7: mod_base = um
  modified_base 8: mod_base = OTHER; note = 2'-Fluoro-uridine
  modified_base 9: mod_base = OTHER; note = 2'-Fluoro-adenosine
  modified_base 10: mod_base = OTHER; note = 2'-O-methyl-adenosine
  modified_base 11: mod_base = cm
  modified_base 12: mod_base = gm
  modified_base 13: mod_base = gm
  modified_base 14: mod_base = OTHER; note = 2'-Fluoro-adenosine
  modified_base 15: mod_base = cm
  modified_base 16: mod_base = OTHER; note = 2'-Fluoro-uridine
  modified_base 17: mod_base = um
  modified_base 18: mod_base = gm
  modified_base 19: mod_base = OTHER; note = 2'-O-methyl-adenosine
  modified_base 20: mod_base = OTHER; note = 2'-Fluoro-guanosine
  modified_base 21: mod_base = OTHER; note = 2'-O-methyl-adenosine
  modified_base 21^22: mod_base = OTHER; note = Phosphorothioate bond
  modified_base 22: mod_base = gm
  modified_base 22^23: mod_base = OTHER; note = Phosphorothioate bond
  modified_base 23: mod_base = OTHER; note = 2'-O-methyl-adenosine
tgctacttaacggacttgagaga

SEQ ID NO: 724 - RNA, 23 nt, synthetic construct
  source 1..23: mol_type = other RNA
  modified_base 1: mod_base = gm
  modified_base 1^2: mod_base = OTHER; note = Phosphorothioate bond
  modified_base 2: mod_base = OTHER; note = 2'-Fluoro-adenosine
  modified_base 2^3: mod_base = OTHER; note = Phosphorothioate bond
  modified_base 3: mod_base = OTHER; note = 2'-O-methyl-adenosine
  modified_base 4: mod_base = gm
  modified_base 5: mod_base = OTHER; note = 2'-O-methyl-adenosine
  modified_base 6: mod_base = OTHER; note = 2'-Fluoro-uridine
  modified_base 7: mod_base = gm
  modified_base 8: mod_base = OTHER; note = 2'-Fluoro-uridine
  modified_base 9: mod_base = OTHER; note = 2'-Fluoro-cytidine
  modified_base 10: mod_base = OTHER; note = 2'-O-methyl-adenosine
  modified_base 11: mod_base = um
  modified_base 12: mod_base = gm
  modified_base 13: mod_base = um
  modified_base 14: mod_base = OTHER; note = 2'-Fluoro-uridine
  modified_base 15: mod_base = cm
  modified_base 16: mod_base = OTHER; note = 2'-Fluoro-adenosine
  modified_base 17: mod_base = gm
  modified_base 18: mod_base = OTHER; note = 2'-O-methyl-adenosine
  modified_base 19: mod_base = gm
  modified_base 20: mod_base = OTHER; note = 2'-Fluoro-guanosine
  modified_base 21: mod_base = gm
  modified_base 21^22: mod_base = OTHER; note = Phosphorothioate bond
  modified_base 22: mod_base = cm
  modified_base 22^23: mod_base = OTHER; note = Phosphorothioate bond
  modified_base 23: mod_base = um
gaagatgtcatgttcagagggct

SEQ ID NO: 725 - RNA, 23 nt, synthetic construct
  source 1..23: mol_type = other RNA
  modified_base 1: mod_base = um
  modified_base 1^2: mod_base = OTHER; note = Phosphorothioate bond
  modified_base 2: mod_base = OTHER; note = 2'-Fluoro-adenosine
  modified_base 2^3: mod_base = OTHER; note = Phosphorothioate bond
  modified_base 3: mod_base = cm
  modified_base 4: mod_base = OTHER; note = 2'-O-methyl-adenosine
  modified_base 5: mod_base = gm
  modified_base 6: mod_base = OTHER; note = 2'-Fluoro-uridine
  modified_base 7: mod_base = um
  modified_base 8: mod_base = OTHER; note = 2'-Fluoro-guanosine
  modified_base 9: mod_base = OTHER; note = 2'-Fluoro-cytidine
  modified_base 10: mod_base = um
  modified_base 11: mod_base = gm
  modified_base 12: mod_base = OTHER; note = 2'-O-methyl-adenosine
  modified_base 13: mod_base = OTHER; note = 2'-O-methyl-adenosine
  modified_base 14: mod_base = OTHER; note = 2'-Fluoro-adenosine
  modified_base 15: mod_base = gm
  modified_base 16: mod_base = OTHER; note = 2'-Fluoro-uridine
  modified_base 17: mod_base = um
  modified_base 18: mod_base = cm
  modified_base 19: mod_base = cm
  modified_base 20: mod_base = OTHER; note = 2'-Fluoro-uridine
  modified_base 21: mod_base = um
  modified_base 21^22: mod_base = OTHER; note = Phosphorothioate bond
  modified_base 22: mod_base = OTHER; note = 2'-O-methyl-adenosine
  modified_base 22^23: mod_base = OTHER; note = Phosphorothioate bond
  modified_base 23: mod_base = gm
tacagttgctgaaagttccttag

SEQ ID NO: 726 - RNA, 23 nt, synthetic construct
  source 1..23: mol_type = other RNA
  modified_base 1: mod_base = OTHER; note = 2'-O-methyl-adenosine
  modified_base 1^2: mod_base = OTHER; note = Phosphorothioate bond
  modified_base 2: mod_base = OTHER; note = 2'-Fluoro-uridine
  modified_base 2^3: mod_base = OTHER; note = Phosphorothioate bond
  modified_base 3: mod_base = OTHER; note = 2'-O-methyl-adenosine
  modified_base 4: mod_base = gm
  modified_base 5: mod_base = um
  modified_base 6: mod_base = OTHER; note = 2'-Fluoro-cytidine
  modified_base 7: mod_base = OTHER; note = 2'-O-methyl-adenosine
  modified_base 8: mod_base = OTHER; note = 2'-Fluoro-guanosine
  modified_base 9: mod_base = OTHER; note = 2'-Fluoro-cytidine
  modified_base 10: mod_base = OTHER; note = 2'-O-methyl-adenosine
  modified_base 11: mod_base = um
  modified_base 12: mod_base = cm
  modified_base 13: mod_base = um
  modified_base 14: mod_base = OTHER; note = 2'-Fluoro-cytidine
  modified_base 15: mod_base = um
  modified_base 16: mod_base = OTHER; note = 2'-Fluoro-uridine
  modified_base 17: mod_base = OTHER; note = 2'-O-methyl-adenosine
  modified_base 18: mod_base = cm
  modified_base 19: mod_base = OTHER; note = 2'-O-methyl-adenosine
  modified_base 20: mod_base = OTHER; note = 2'-Fluoro-guanosine
  modified_base 21: mod_base = OTHER; note = 2'-O-methyl-adenosine
  modified_base 21^22: mod_base = OTHER; note = Phosphorothioate bond
  modified_base 22: mod_base = OTHER; note = 2'-O-methyl-adenosine
  modified_base 22^23: mod_base = OTHER; note = Phosphorothioate bond
  modified_base 23: mod_base = um
atagtcagcatctcttacagaat

SEQ ID NO: 727 - RNA, 23 nt, synthetic construct
  source 1..23: mol_type = other RNA
  modified_base 1: mod_base = um
  modified_base 1^2: mod_base = OTHER; note = Phosphorothioate bond
  modified_base 2: mod_base = OTHER; note = 2'-Fluoro-uridine
  modified_base 2^3: mod_base = OTHER; note = Phosphorothioate bond
  modified_base 3: mod_base = um
  modified_base 4: mod_base = cm
  modified_base 5: mod_base = cm
  modified_base 6: mod_base = OTHER; note = 2'-Fluoro-uridine
  modified_base 7: mod_base = um
  modified_base 8: mod_base = OTHER; note = 2'-Fluoro-uridine
  modified_base 9: mod_base = OTHER; note = 2'-Fluoro-guanosine
  modified_base 10: mod_base = um
  modified_base 11: mod_base = OTHER; note = 2'-O-methyl-adenosine
  modified_base 12: mod_base = OTHER; note = 2'-O-methyl-adenosine
  modified_base 13: mod_base = OTHER; note = 2'-O-methyl-adenosine
  modified_base 14: mod_base = OTHER; note = 2'-Fluoro-adenosine
  modified_base 15: mod_base = um
  modified_base 16: mod_base = OTHER; note = 2'-Fluoro-uridine
  modified_base 17: mod_base = um
  modified_base 18: mod_base = cm
  modified_base 19: mod_base = OTHER; note = 2'-O-methyl-adenosine
  modified_base 20: mod_base = OTHER; note = 2'-Fluoro-cytidine
  modified_base 21: mod_base = cm
  modified_base 21^22: mod_base = OTHER; note = Phosphorothioate bond
  modified_base 22: mod_base = OTHER; note = 2'-O-methyl-adenosine
  modified_base 22^23: mod_base = OTHER; note = Phosphorothioate bond
  modified_base 23: mod_base = gm
tttcctttgtaaaatttcaccag

SEQ ID NO: 728 - RNA, 23 nt, synthetic construct
  source 1..23: mol_type = other RNA
  modified_base 1: mod_base = OTHER; note = 2'-O-methyl-adenosine
  modified_base 1^2: mod_base = OTHER; note = Phosphorothioate bond
  modified_base 2: mod_base = OTHER; note = 2'-Fluoro-guanosine
  modified_base 2^3: mod_base = OTHER; note = Phosphorothioate bond
  modified_base 3: mod_base = um
  modified_base 4: mod_base = um
  modified_base 5: mod_base = gm
  modified_base 6: mod_base = OTHER; note = 2'-Fluoro-cytidine
  modified_base 7: mod_base = um
  modified_base 8: mod_base = OTHER; note = 2'-Fluoro-guanosine
  modified_base 9: mod_base = OTHER; note = 2'-Fluoro-adenosine
  modified_base 10: mod_base = OTHER; note = 2'-O-methyl-adenosine
  modified_base 11: mod_base = OTHER; note = 2'-O-methyl-adenosine
  modified_base 12: mod_base = gm
  modified_base 13: mod_base = um
  modified_base 14: mod_base = OTHER; note = 2'-Fluoro-uridine
  modified_base 15: mod_base = cm
  modified_base 16: mod_base = OTHER; note = 2'-Fluoro-cytidine
  modified_base 17: mod_base = um
  modified_base 18: mod_base = um
  modified_base 19: mod_base = OTHER; note = 2'-O-methyl-adenosine
  modified_base 20: mod_base = OTHER; note = 2'-Fluoro-guanosine
  modified_base 21: mod_base = OTHER; note = 2'-O-methyl-adenosine
  modified_base 21^22: mod_base = OTHER; note = Phosphorothioate bond
  modified_base 22: mod_base = um
  modified_base 22^23: mod_base = OTHER; note = Phosphorothioate bond
  modified_base 23: mod_base = um
agttgctgaaagttccttagatt

SEQ ID NO: 729 - RNA, 23 nt, synthetic construct
  source 1..23: mol_type = other RNA
  modified_base 1: mod_base = OTHER; note = 2'-O-methyl-adenosine
  modified_base 1^2: mod_base = OTHER; note = Phosphorothioate bond
  modified_base 2: mod_base = OTHER; note = 2'-Fluoro-uridine
  modified_base 2^3: mod_base = OTHER; note = Phosphorothioate bond
  modified_base 3: mod_base = gm
  modified_base 4: mod_base = um
  modified_base 5: mod_base = OTHER; note = 2'-O-methyl-adenosine
  modified_base 6: mod_base = OTHER; note = 2'-Fluoro-adenosine
  modified_base 7: mod_base = um
  modified_base 8: mod_base = OTHER; note = 2'-Fluoro-uridine
  modified_base 9: mod_base = OTHER; note = 2'-Fluoro-uridine
  modified_base 10: mod_base = gm
  modified_base 11: mod_base = um
  modified_base 12: mod_base = cm
  modified_base 13: mod_base = cm
  modified_base 14: mod_base = OTHER; note = 2'-Fluoro-uridine
  modified_base 15: mod_base = cm
  modified_base 16: mod_base = OTHER; note = 2'-Fluoro-adenosine
  modified_base 17: mod_base = um
  modified_base 18: mod_base = um
  modified_base 19: mod_base = um
  modified_base 20: mod_base = OTHER; note = 2'-Fluoro-cytidine
  modified_base 21: mod_base = um
  modified_base 21^22: mod_base = OTHER; note = Phosphorothioate bond
  modified_base 22: mod_base = um
  modified_base 22^23: mod_base = OTHER; note = Phosphorothioate bond
  modified_base 23: mod_base = cm
atgtaatttgtcctcatttcttc

SEQ ID NO: 730 - RNA, 23 nt, synthetic construct
  source 1..23: mol_type = other RNA
  modified_base 1: mod_base = um
  modified_base 1^2: mod_base = OTHER; note = Phosphorothioate bond
  modified_base 2: mod_base = OTHER; note = 2'-Fluoro-uridine
  modified_base 2^3: mod_base = OTHER; note = Phosphorothioate bond
  modified_base 3: mod_base = gm
  modified_base 4: mod_base = OTHER; note = 2'-O-methyl-adenosine
  modified_base 5: mod_base = um
  modified_base 6: mod_base = OTHER; note = 2'-Fluoro-uridine
  modified_base 7: mod_base = cm
  modified_base 8: mod_base = OTHER; note = 2'-Fluoro-uridine
  modified_base 9: mod_base = OTHER; note = 2'-Fluoro-uridine
  modified_base 10: mod_base = gm
  modified_base 11: mod_base = cm
  modified_base 12: mod_base = um
  modified_base 13: mod_base = um
  modified_base 14: mod_base = OTHER; note = 2'-Fluoro-uridine
  modified_base 15: mod_base = OTHER; note = 2'-O-methyl-adenosine
  modified_base 16: mod_base = OTHER; note = 2'-Fluoro-uridine
  modified_base 17: mod_base = um
  modified_base 18: mod_base = gm
  modified_base 19: mod_base = gm
  modified_base 20: mod_base = OTHER; note = 2'-Fluoro-uridine
  modified_base 21: mod_base = OTHER; note = 2'-O-methyl-adenosine
  modified_base 21^22: mod_base = OTHER; note = Phosphorothioate bond
  modified_base 22: mod_base = cm
  modified_base 22^23: mod_base = OTHER; note = Phosphorothioate bond
  modified_base 23: mod_base = um
ttgattcttgctttattggtact

SEQ ID NO: 731 - RNA, 23 nt, synthetic construct
  source 1..23: mol_type = other RNA
  modified_base 1: mod_base = OTHER; note = 2'-O-methyl-adenosine
  modified_base 1^2: mod_base = OTHER; note = Phosphorothioate bond
  modified_base 2: mod_base = OTHER; note = 2'-Fluoro-adenosine
  modified_base 2^3: mod_base = OTHER; note = Phosphorothioate bond
  modified_base 3: mod_base = um
  modified_base 4: mod_base = um
  modified_base 5: mod_base = cm
  modified_base 6: mod_base = OTHER; note = 2'-Fluoro-adenosine
  modified_base 7: mod_base = um
  modified_base 8: mod_base = OTHER; note = 2'-Fluoro-uridine
  modified_base 9: mod_base = OTHER; note = 2'-Fluoro-cytidine
  modified_base 10: mod_base = cm
  modified_base 11: mod_base = OTHER; note = 2'-O-methyl-adenosine
  modified_base 12: mod_base = gm
  modified_base 13: mod_base = cm
  modified_base 14: mod_base = OTHER; note = 2'-Fluoro-uridine
  modified_base 15: mod_base = um
  modified_base 16: mod_base = OTHER; note = 2'-Fluoro-guanosine
  modified_base 17: mod_base = OTHER; note = 2'-O-methyl-adenosine
  modified_base 18: mod_base = OTHER; note = 2'-O-methyl-adenosine
  modified_base 19: mod_base = gm
  modified_base 20: mod_base = OTHER; note = 2'-Fluoro-adenosine
  modified_base 21: mod_base = cm
  modified_base 21^22: mod_base = OTHER; note = Phosphorothioate bond
  modified_base 22: mod_base = OTHER; note = 2'-O-methyl-adenosine
  modified_base 22^23: mod_base = OTHER; note = Phosphorothioate bond
  modified_base 23: mod_base = um
aattcattccagcttgaagacat

SEQ ID NO: 732 - RNA, 23 nt, synthetic construct
  source 1..23: mol_type = other RNA
  modified_base 1: mod_base = OTHER; note = 2'-O-methyl-adenosine
  modified_base 1^2: mod_base = OTHER; note = Phosphorothioate bond
  modified_base 2: mod_base = OTHER; note = 2'-Fluoro-uridine
  modified_base 2^3: mod_base = OTHER; note = Phosphorothioate bond
  modified_base 3: mod_base = gm
  modified_base 4: mod_base = um
  modified_base 5: mod_base = OTHER; note = 2'-O-methyl-adenosine
  modified_base 6: mod_base = OTHER; note = 2'-Fluoro-cytidine
  modified_base 7: mod_base = um
  modified_base 8: mod_base = OTHER; note = 2'-Fluoro-guanosine
  modified_base 9: mod_base = OTHER; note = 2'-Fluoro-guanosine
  modified_base 10: mod_base = OTHER; note = 2'-O-methyl-adenosine
  modified_base 11: mod_base = cm
  modified_base 12: mod_base = OTHER; note = 2'-O-methyl-adenosine
  modified_base 13: mod_base = OTHER; note = 2'-O-methyl-adenosine
  modified_base 14: mod_base = OTHER; note = 2'-Fluoro-uridine
  modified_base 15: mod_base = OTHER; note = 2'-O-methyl-adenosine
  modified_base 16: mod_base = OTHER; note = 2'-Fluoro-uridine
  modified_base 17: mod_base = um
  modified_base 18: mod_base = OTHER; note = 2'-O-methyl-adenosine
  modified_base 19: mod_base = OTHER; note = 2'-O-methyl-adenosine
  modified_base 20: mod_base = OTHER; note = 2'-Fluoro-guanosine
  modified_base 21: mod_base = cm
  modified_base 21^22: mod_base = OTHER; note = Phosphorothioate bond
  modified_base 22: mod_base = um
  modified_base 22^23: mod_base = OTHER; note = Phosphorothioate bond
  modified_base 23: mod_base = gm
atgtactggacaatattaagctg

SEQ ID NO: 733 - RNA, 23 nt, synthetic construct
  source 1..23: mol_type = other RNA
  modified_base 1: mod_base = um
  modified_base 1^2: mod_base = OTHER; note = Phosphorothioate bond
  modified_base 2: mod_base = OTHER; note = 2'-Fluoro-uridine
  modified_base 2^3: mod_base = OTHER; note = Phosphorothioate bond
  modified_base 3: mod_base = OTHER; note = 2'-O-methyl-adenosine
  modified_base 4: mod_base = cm
  modified_base 5: mod_base = OTHER; note = 2'-O-methyl-adenosine
  modified_base 6: mod_base = OTHER; note = 2'-Fluoro-guanosine
  modified_base 7: mod_base = OTHER; note = 2'-O-methyl-adenosine
  modified_base 8: mod_base = OTHER; note = 2'-Fluoro-adenosine
  modified_base 9: mod_base = OTHER; note = 2'-Fluoro-uridine
  modified_base 10: mod_base = cm
  modified_base 11: mod_base = cm
  modified_base 12: mod_base = OTHER; note = 2'-O-methyl-adenosine
  modified_base 13: mod_base = um
  modified_base 14: mod_base = OTHER; note = 2'-Fluoro-adenosine
  modified_base 15: mod_base = um
  modified_base 16: mod_base = OTHER; note = 2'-Fluoro-adenosine
  modified_base 17: mod_base = um
  modified_base 18: mod_base = OTHER; note = 2'-O-methyl-adenosine
  modified_base 19: mod_base = OTHER; note = 2'-O-methyl-adenosine
  modified_base 20: mod_base = OTHER; note = 2'-Fluoro-adenosine
  modified_base 21: mod_base = cm
  modified_base 21^22: mod_base = OTHER; note = Phosphorothioate bond
  modified_base 22: mod_base = cm
  modified_base 22^23: mod_base = OTHER; note = Phosphorothioate bond
  modified_base 23: mod_base = cm
ttacagaatccatatataaaccc

SEQ ID NO: 734 - RNA, 23 nt, synthetic construct
  source 1..23: mol_type = other RNA
  modified_base 1: mod_base = um
  modified_base 1^2: mod_base = OTHER; note = Phosphorothioate bond
  modified_base 2: mod_base = OTHER; note = 2'-Fluoro-uridine
  modified_base 2^3: mod_base = OTHER; note = Phosphorothioate bond
  modified_base 3: mod_base = um
  modified_base 4: mod_base = um
  modified_base 5: mod_base = OTHER; note = 2'-O-methyl-adenosine
  modified_base 6: mod_base = OTHER; note = 2'-Fluoro-cytidine
  modified_base 7: mod_base = OTHER; note = 2'-O-methyl-adenosine
  modified_base 8: mod_base = OTHER; note = 2'-Fluoro-cytidine
  modified_base 9: mod_base = OTHER; note = 2'-Fluoro-uridine
  modified_base 10: mod_base = gm
  modified_base 11: mod_base = cm
  modified_base 12: mod_base = OTHER; note = 2'-O-methyl-adenosine
  modified_base 13: mod_base = gm
  modified_base 14: mod_base = OTHER; note = 2'-Fluoro-uridine
  modified_base 15: mod_base = gm
  modified_base 16: mod_base = OTHER; note = 2'-Fluoro-adenosine
  modified_base 17: mod_base = cm
  modified_base 18: mod_base = um
  modified_base 19: mod_base = um
  modified_base 20: mod_base = OTHER; note = 2'-Fluoro-guanosine
  modified_base 21: mod_base = gm
  modified_base 21^22: mod_base = OTHER; note = Phosphorothioate bond
  modified_base 22: mod_base = OTHER; note = 2'-O-methyl-adenosine
  modified_base 22^23: mod_base = OTHER; note = Phosphorothioate bond
  modified_base 23: mod_base = gm
ttttacactgcagtgacttggag

SEQ ID NO: 735 - RNA, 23 nt, synthetic construct
  source 1..23: mol_type = other RNA
  modified_base 1: mod_base = gm
  modified_base 1^2: mod_base = OTHER; note = Phosphorothioate bond
  modified_base 2: mod_base = OTHER; note = 2'-Fluoro-guanosine
  modified_base 2^3: mod_base = OTHER; note = Phosphorothioate bond
  modified_base 3: mod_base = OTHER; note = 2'-O-methyl-adenosine
  modified_base 4: mod_base = OTHER; note = 2'-O-methyl-adenosine
  modified_base 5: mod_base = um
  modified_base 6: mod_base = OTHER; note = 2'-Fluoro-adenosine
  modified_base 7: mod_base = OTHER; note = 2'-O-methyl-adenosine
  modified_base 8: mod_base = OTHER; note = 2'-Fluoro-uridine
  modified_base 9: mod_base = OTHER; note = 2'-Fluoro-adenosine
  modified_base 10: mod_base = gm
  modified_base 11: mod_base = um
  modified_base 12: mod_base = cm
  modified_base 13: mod_base = um
  modified_base 14: mod_base = OTHER; note = 2'-Fluoro-uridine
  modified_base 15: mod_base = um
  modified_base 16: mod_base = OTHER; note = 2'-Fluoro-adenosine
  modified_base 17: mod_base = um
  modified_base 18: mod_base = cm
  modified_base 19: mod_base = OTHER; note = 2'-O-methyl-adenosine
  modified_base 20: mod_base = OTHER; note = 2'-Fluoro-uridine
  modified_base 21: mod_base = cm
  modified_base 21^22: mod_base = OTHER; note = Phosphorothioate bond
  modified_base 22: mod_base = cm
  modified_base 22^23: mod_base = OTHER; note = Phosphorothioate bond
  modified_base 23: mod_base = OTHER; note = 2'-O-methyl-adenosine
ggaataatagtctttatcatcca

SEQ ID NO: 736 - RNA, 23 nt, synthetic construct
  source 1..23: mol_type = other RNA
  modified_base 1: mod_base = OTHER; note = 2'-O-methyl-adenosine
  modified_base 1^2: mod_base = OTHER; note = Phosphorothioate bond
  modified_base 2: mod_base = OTHER; note = 2'-Fluoro-adenosine
  modified_base 2^3: mod_base = OTHER; note = Phosphorothioate bond
  modified_base 3: mod_base = um
  modified_base 4: mod_base = cm
  modified_base 5: mod_base = um
  modified_base 6: mod_base = OTHER; note = 2'-Fluoro-uridine
  modified_base 7: mod_base = OTHER; note = 2'-O-methyl-adenosine
  modified_base 8: mod_base = OTHER; note = 2'-Fluoro-uridine
  modified_base 9: mod_base = OTHER; note = 2'-Fluoro-cytidine
  modified_base 10: mod_base = OTHER; note = 2'-O-methyl-adenosine
  modified_base 11: mod_base = OTHER; note = 2'-O-methyl-adenosine
  modified_base 12: mod_base = um
  modified_base 13: mod_base = gm
  modified_base 14: mod_base = OTHER; note = 2'-Fluoro-adenosine
  modified_base 15: mod_base = um
  modified_base 16: mod_base = OTHER; note = 2'-Fluoro-guanosine
  modified_base 17: mod_base = cm
  modified_base 18: mod_base = OTHER; note = 2'-O-methyl-adenosine
  modified_base 19: mod_base = OTHER; note = 2'-O-methyl-adenosine
  modified_base 20: mod_base = OTHER; note = 2'-Fluoro-uridine
  modified_base 21: mod_base = cm
  modified_base 21^22: mod_base = OTHER; note = Phosphorothioate bond
  modified_base 22: mod_base = OTHER; note = 2'-O-methyl-adenosine
  modified_base 22^23: mod_base = OTHER; note = Phosphorothioate bond
  modified_base 23: mod_base = um
aatcttatcaatgatgcaatcat

SEQ ID NO: 737 - RNA, 23 nt, synthetic construct
  source 1..23: mol_type = other RNA
  modified_base 1: mod_base = um
  modified_base 1^2: mod_base = OTHER; note = Phosphorothioate bond
  modified_base 2: mod_base = OTHER; note = 2'-Fluoro-uridine
  modified_base 2^3: mod_base = OTHER; note = Phosphorothioate bond
  modified_base 3: mod_base = cm
  modified_base 4: mod_base = cm
  modified_base 5: mod_base = um
  modified_base 6: mod_base = OTHER; note = 2'-Fluoro-uridine
  modified_base 7: mod_base = um
  modified_base 8: mod_base = OTHER; note = 2'-Fluoro-guanosine
  modified_base 9: mod_base = OTHER; note = 2'-Fluoro-uridine
  modified_base 10: mod_base = OTHER; note = 2'-O-methyl-adenosine
  modified_base 11: mod_base = OTHER; note = 2'-O-methyl-adenosine
  modified_base 12: mod_base = OTHER; note = 2'-O-methyl-adenosine
  modified_base 13: mod_base = OTHER; note = 2'-O-methyl-adenosine
  modified_base 14: mod_base = OTHER; note = 2'-Fluoro-uridine
  modified_base 15: mod_base = um
  modified_base 16: mod_base = OTHER; note = 2'-Fluoro-uridine
  modified_base 17: mod_base = cm
  modified_base 18: mod_base = OTHER; note = 2'-O-methyl-adenosine
  modified_base 19: mod_base = cm
  modified_base 20: mod_base = OTHER; note = 2'-Fluoro-cytidine
  modified_base 21: mod_base = OTHER; note = 2'-O-methyl-adenosine
  modified_base 21^22: mod_base = OTHER; note = Phosphorothioate bond
  modified_base 22: mod_base = gm
  modified_base 22^23: mod_base = OTHER; note = Phosphorothioate bond
  modified_base 23: mod_base = cm
ttcctttgtaaaatttcaccagc

SEQ ID NO: 738 - RNA, 23 nt, synthetic construct
  source 1..23: mol_type = other RNA
  modified_base 1: mod_base = OTHER; note = 2'-O-methyl-adenosine
  modified_base 1^2: mod_base = OTHER; note = Phosphorothioate bond
  modified_base 2: mod_base = OTHER; note = 2'-Fluoro-guanosine
  modified_base 2^3: mod_base = OTHER; note = Phosphorothioate bond
  modified_base 3: mod_base = um
  modified_base 4: mod_base = um
  modified_base 5: mod_base = cm
  modified_base 6: mod_base = OTHER; note = 2'-Fluoro-uridine
  modified_base 7: mod_base = um
  modified_base 8: mod_base = OTHER; note = 2'-Fluoro-uridine
  modified_base 9: mod_base = OTHER; note = 2'-Fluoro-guanosine
  modified_base 10: mod_base = OTHER; note = 2'-O-methyl-adenosine
  modified_base 11: mod_base = um
  modified_base 12: mod_base = gm
  modified_base 13: mod_base = um
  modified_base 14: mod_base = OTHER; note = 2'-Fluoro-adenosine
  modified_base 15: mod_base = OTHER; note = 2'-O-methyl-adenosine
  modified_base 16: mod_base = OTHER; note = 2'-Fluoro-uridine
  modified_base 17: mod_base = um
  modified_base 18: mod_base = um
  modified_base 19: mod_base = gm
  modified_base 20: mod_base = OTHER; note = 2'-Fluoro-uridine
  modified_base 21: mod_base = cm
  modified_base 21^22: mod_base = OTHER; note = Phosphorothioate bond
  modified_base 22: mod_base = cm
  modified_base 22^23: mod_base = OTHER; note = Phosphorothioate bond
  modified_base 23: mod_base = um
agttctttgatgtaatttgtcct

SEQ ID NO: 739 - RNA, 23 nt, synthetic construct
  source 1..23: mol_type = other RNA
  modified_base 1: mod_base = gm
  modified_base 1^2: mod_base = OTHER; note = Phosphorothioate bond
  modified_base 2: mod_base = OTHER; note = 2'-Fluoro-guanosine
  modified_base 2^3: mod_base = OTHER; note = Phosphorothioate bond
  modified_base 3: mod_base = OTHER; note = 2'-O-methyl-adenosine
  modified_base 4: mod_base = gm
  modified_base 5: mod_base = OTHER; note = 2'-O-methyl-adenosine
  modified_base 6: mod_base = OTHER; note = 2'-Fluoro-cytidine
  modified_base 7: mod_base = um
  modified_base 8: mod_base = OTHER; note = 2'-Fluoro-guanosine
  modified_base 9: mod_base = OTHER; note = 2'-Fluoro-guanosine
  modified_base 10: mod_base = OTHER; note = 2'-O-methyl-adenosine
  modified_base 11: mod_base = gm
  modified_base 12: mod_base = OTHER; note = 2'-O-methyl-adenosine
  modified_base 13: mod_base = um
  modified_base 14: mod_base = OTHER; note = 2'-Fluoro-uridine
  modified_base 15: mod_base = um
  modified_base 16: mod_base = OTHER; note = 2'-Fluoro-uridine
  modified_base 17: mod_base = OTHER; note = 2'-O-methyl-adenosine
  modified_base 18: mod_base = cm
  modified_base 19: mod_base = OTHER; note = 2'-O-methyl-adenosine
  modified_base 20: mod_base = OTHER; note = 2'-Fluoro-cytidine
  modified_base 21: mod_base = um
  modified_base 21^22: mod_base = OTHER; note = Phosphorothioate bond
  modified_base 22: mod_base = gm
  modified_base 22^23: mod_base = OTHER; note = Phosphorothioate bond
  modified_base 23: mod_base = cm
ggagactggagattttacactgc

SEQ ID NO: 740 - RNA, 23 nt, synthetic construct
  source 1..23: mol_type = other RNA
  modified_base 1: mod_base = um
  modified_base 1^2: mod_base = OTHER; note = Phosphorothioate bond
  modified_base 2: mod_base = OTHER; note = 2'-Fluoro-uridine
  modified_base 2^3: mod_base = OTHER; note = Phosphorothioate bond
  modified_base 3: mod_base = OTHER; note = 2'-O-methyl-adenosine
  modified_base 4: mod_base = gm
  modified_base 5: mod_base = um
  modified_base 6: mod_base = OTHER; note = 2'-Fluoro-adenosine
  modified_base 7: mod_base = gm
  modified_base 8: mod_base = OTHER; note = 2'-Fluoro-cytidine
  modified_base 9: mod_base = OTHER; note = 2'-Fluoro-adenosine
  modified_base 10: mod_base = gm
  modified_base 11: mod_base = cm
  modified_base 12: mod_base = OTHER; note = 2'-O-methyl-adenosine
  modified_base 13: mod_base = OTHER; note = 2'-O-methyl-adenosine
  modified_base 14: mod_base = OTHER; note = 2'-Fluoro-adenosine
  modified_base 15: mod_base = OTHER; note = 2'-O-methyl-adenosine
  modified_base 16: mod_base = OTHER; note = 2'-Fluoro-cytidine
  modified_base 17: mod_base = um
  modified_base 18: mod_base = um
  modified_base 19: mod_base = um
  modified_base 20: mod_base = OTHER; note = 2'-Fluoro-cytidine
  modified_base 21: mod_base = OTHER; note = 2'-O-methyl-adenosine
  modified_base 21^22: mod_base = OTHER; note = Phosphorothioate bond
  modified_base 22: mod_base = um
  modified_base 22^23: mod_base = OTHER; note = Phosphorothioate bond
  modified_base 23: mod_base = gm
ttagtagcagcaaaactttcatg

SEQ ID NO: 741 - RNA, 23 nt, synthetic construct
  source 1..23: mol_type = other RNA
  modified_base 1: mod_base = gm
  modified_base 1^2: mod_base = OTHER; note = Phosphorothioate bond
  modified_base 2: mod_base = OTHER; note = 2'-Fluoro-adenosine
  modified_base 2^3: mod_base = OTHER; note = Phosphorothioate bond
  modified_base 3: mod_base = um
  modified_base 4: mod_base = um
  modified_base 5: mod_base = cm
  modified_base 6: mod_base = OTHER; note = 2'-Fluoro-cytidine
  modified_base 7: mod_base = OTHER; note = 2'-O-methyl-adenosine
  modified_base 8: mod_base = OTHER; note = 2'-Fluoro-guanosine
  modified_base 9: mod_base = OTHER; note = 2'-Fluoro-cytidine
  modified_base 10: mod_base = um
  modified_base 11: mod_base = cm
  modified_base 12: mod_base = OTHER; note = 2'-O-methyl-adenosine
  modified_base 13: mod_base = gm
  modified_base 14: mod_base = OTHER; note = 2'-Fluoro-uridine
  modified_base 15: mod_base = um
  modified_base 16: mod_base = OTHER; note = 2'-Fluoro-uridine
  modified_base 17: mod_base = um
  modified_base 18: mod_base = OTHER; note = 2'-O-methyl-adenosine
  modified_base 19: mod_base = OTHER; note = 2'-O-methyl-adenosine
  modified_base 20: mod_base = OTHER; note = 2'-Fluoro-uridine
  modified_base 21: mod_base = OTHER; note = 2'-O-methyl-adenosine
  modified_base 21^22: mod_base = OTHER; note = Phosphorothioate bond
  modified_base 22: mod_base = um
  modified_base 22^23: mod_base = OTHER; note = Phosphorothioate bond
  modified_base 23: mod_base = cm
gattccagctcagttttaatatc

SEQ ID NO: 742 - RNA, 23 nt, synthetic construct
  source 1..23: mol_type = other RNA
  modified_base 1: mod_base = um
  modified_base 1^2: mod_base = OTHER; note = Phosphorothioate bond
  modified_base 2: mod_base = OTHER; note = 2'-Fluoro-cytidine
  modified_base 2^3: mod_base = OTHER; note = Phosphorothioate bond
  modified_base 3: mod_base = um
  modified_base 4: mod_base = um
  modified_base 5: mod_base = um
  modified_base 6: mod_base = OTHER; note = 2'-Fluoro-adenosine
  modified_base 7: mod_base = um
  modified_base 8: mod_base = OTHER; note = 2'-Fluoro-cytidine
  modified_base 9: mod_base = OTHER; note = 2'-Fluoro-adenosine
  modified_base 10: mod_base = um
  modified_base 11: mod_base = cm
  modified_base 12: mod_base = cm
  modified_base 13: mod_base = OTHER; note = 2'-O-methyl-adenosine
  modified_base 14: mod_base = OTHER; note = 2'-Fluoro-uridine
  modified_base 15: mod_base = OTHER; note = 2'-O-methyl-adenosine
  modified_base 16: mod_base = OTHER; note = 2'-Fluoro-adenosine
  modified_base 17: mod_base = OTHER; note = 2'-O-methyl-adenosine
  modified_base 18: mod_base = gm
  modified_base 19: mod_base = gm
  modified_base 20: mod_base = OTHER; note = 2'-Fluoro-adenosine
  modified_base 21: mod_base = OTHER; note = 2'-O-methyl-adenosine
  modified_base 21^22: mod_base = OTHER; note = Phosphorothioate bond
  modified_base 22: mod_base = OTHER; note = 2'-O-methyl-adenosine
  modified_base 22^23: mod_base = OTHER; note = Phosphorothioate bond
  modified_base 23: mod_base = OTHER; note = 2'-O-methyl-adenosine
tctttatcatccataaaggaaaa

SEQ ID NO: 743 - RNA, 23 nt, synthetic construct
  source 1..23: mol_type = other RNA
  modified_base 1: mod_base = um
  modified_base 1^2: mod_base = OTHER; note = Phosphorothioate bond
  modified_base 2: mod_base = OTHER; note = 2'-Fluoro-uridine
  modified_base 2^3: mod_base = OTHER; note = Phosphorothioate bond
  modified_base 3: mod_base = gm
  modified_base 4: mod_base = um
  modified_base 5: mod_base = um
  modified_base 6: mod_base = OTHER; note = 2'-Fluoro-uridine
  modified_base 7: mod_base = OTHER; note = 2'-O-methyl-adenosine
  modified_base 8: mod_base = OTHER; note = 2'-Fluoro-adenosine
  modified_base 9: mod_base = OTHER; note = 2'-Fluoro-uridine
  modified_base 10: mod_base = OTHER; note = 2'-O-methyl-adenosine
  modified_base 11: mod_base = cm
  modified_base 12: mod_base = cm
  modified_base 13: mod_base = cm
  modified_base 14: mod_base = OTHER; note = 2'-Fluoro-adenosine
  modified_base 15: mod_base = cm
  modified_base 16: mod_base = OTHER; note = 2'-Fluoro-uridine
  modified_base 17: mod_base = gm
  modified_base 18: mod_base = gm
  modified_base 19: mod_base = gm
  modified_base 20: mod_base = OTHER; note = 2'-Fluoro-adenosine
  modified_base 21: mod_base = OTHER; note = 2'-O-methyl-adenosine
  modified_base 21^22: mod_base = OTHER; note = Phosphorothioate bond
  modified_base 22: mod_base = um
  modified_base 22^23: mod_base = OTHER; note = Phosphorothioate bond
  modified_base 23: mod_base = cm
ttgtttaatacccactgggaatc

SEQ ID NO: 744 - RNA, 23 nt, synthetic construct
  source 1..23: mol_type = other RNA
  modified_base 1: mod_base = OTHER; note = 2'-O-methyl-adenosine
  modified_base 1^2: mod_base = OTHER; note = Phosphorothioate bond
  modified_base 2: mod_base = OTHER; note = 2'-Fluoro-uridine
  modified_base 2^3: mod_base = OTHER; note = Phosphorothioate bond
  modified_base 3: mod_base = gm
  modified_base 4: mod_base = um
  modified_base 5: mod_base = OTHER; note = 2'-O-methyl-adenosine
  modified_base 6: mod_base = OTHER; note = 2'-Fluoro-cytidine
  modified_base 7: mod_base = um
  modified_base 8: mod_base = OTHER; note = 2'-Fluoro-guanosine
  modified_base 9: mod_base = OTHER; note = 2'-Fluoro-guanosine
  modified_base 10: mod_base = OTHER; note = 2'-O-methyl-adenosine
  modified_base 11: mod_base = um
  modified_base 12: mod_base = cm
  modified_base 13: mod_base = cm
  modified_base 14: mod_base = OTHER; note = 2'-Fluoro-adenosine
  modified_base 15: mod_base = gm
  modified_base 16: mod_base = OTHER; note = 2'-Fluoro-cytidine
  modified_base 17: mod_base = OTHER; note = 2'-O-methyl-adenosine
  modified_base 18: mod_base = gm
  modified_base 19: mod_base = OTHER; note = 2'-O-methyl-adenosine
  modified_base 20: mod_base = OTHER; note = 2'-Fluoro-guanosine
  modified_base 21: mod_base = gm
  modified_base 21^22: mod_base = OTHER; note = Phosphorothioate bond
  modified_base 22: mod_base = um
  modified_base 22^23: mod_base = OTHER; note = Phosphorothioate bond
  modified_base 23: mod_base = gm
atgtactggatccagcagaggtg

SEQ ID NO: 745 - RNA, 23 nt, synthetic construct
  source 1..23: mol_type = other RNA
  modified_base 1: mod_base = gm
  modified_base 1^2: mod_base = OTHER; note = Phosphorothioate bond
  modified_base 2: mod_base = OTHER; note = 2'-Fluoro-uridine
  modified_base 2^3: mod_base = OTHER; note = Phosphorothioate bond
  modified_base 3: mod_base = cm
  modified_base 4: mod_base = OTHER; note = 2'-O-methyl-adenosine
  modified_base 5: mod_base = gm
  modified_base 6: mod_base = OTHER; note = 2'-Fluoro-cytidine
  modified_base 7: mod_base = OTHER; note = 2'-O-methyl-adenosine
  modified_base 8: mod_base = OTHER; note = 2'-Fluoro-uridine
  modified_base 9: mod_base = OTHER; note = 2'-Fluoro-cytidine
  modified_base 10: mod_base = um
  modified_base 11: mod_base = cm
  modified_base 12: mod_base = um
  modified_base 13: mod_base = um
  modified_base 14: mod_base = OTHER; note = 2'-Fluoro-adenosine
  modified_base 15: mod_base = cm
  modified_base 16: mod_base = OTHER; note = 2'-Fluoro-adenosine
  modified_base 17: mod_base = gm
  modified_base 18: mod_base = OTHER; note = 2'-O-methyl-adenosine
  modified_base 19: mod_base = OTHER; note = 2'-O-methyl-adenosine
  modified_base 20: mod_base = OTHER; note = 2'-Fluoro-uridine
  modified_base 21: mod_base = cm
  modified_base 21^22: mod_base = OTHER; note = Phosphorothioate bond
  modified_base 22: mod_base = cm
  modified_base 22^23: mod_base = OTHER; note = Phosphorothioate bond
  modified_base 23: mod_base = OTHER; note = 2'-O-methyl-adenosine
gtcagcatctcttacagaatcca

SEQ ID NO: 746 - RNA, 23 nt, synthetic construct
  source 1..23: mol_type = other RNA
  modified_base 1: mod_base = um
  modified_base 1^2: mod_base = OTHER; note = Phosphorothioate bond
  modified_base 2: mod_base = OTHER; note = 2'-Fluoro-adenosine
  modified_base 2^3: mod_base = OTHER; note = Phosphorothioate bond
  modified_base 3: mod_base = cm
  modified_base 4: mod_base = gm
  modified_base 5: mod_base = um
  modified_base 6: mod_base = OTHER; note = 2'-Fluoro-uridine
  modified_base 7: mod_base = gm
  modified_base 8: mod_base = OTHER; note = 2'-Fluoro-adenosine
  modified_base 9: mod_base = OTHER; note = 2'-Fluoro-cytidine
  modified_base 10: mod_base = OTHER; note = 2'-O-methyl-adenosine
  modified_base 11: mod_base = OTHER; note = 2'-O-methyl-adenosine
  modified_base 12: mod_base = um
  modified_base 13: mod_base = cm
  modified_base 14: mod_base = OTHER; note = 2'-Fluoro-uridine
  modified_base 15: mod_base = cm
  modified_base 16: mod_base = OTHER; note = 2'-Fluoro-cytidine
  modified_base 17: mod_base = OTHER; note = 2'-O-methyl-adenosine
  modified_base 18: mod_base = um
  modified_base 19: mod_base = gm
  modified_base 20: mod_base = OTHER; note = 2'-Fluoro-uridine
  modified_base 21: mod_base = OTHER; note = 2'-O-methyl-adenosine
  modified_base 21^22: mod_base = OTHER; note = Phosphorothioate bond
  modified_base 22: mod_base = gm
  modified_base 22^23: mod_base = OTHER; note = Phosphorothioate bond
  modified_base 23: mod_base = um
tacgttgacaatctccatgtagt

SEQ ID NO: 747 - RNA, 23 nt, synthetic construct
  source 1..23: mol_type = other RNA
  modified_base 1: mod_base = gm
  modified_base 1^2: mod_base = OTHER; note = Phosphorothioate bond
  modified_base 2: mod_base = OTHER; note = 2'-Fluoro-adenosine
  modified_base 2^3: mod_base = OTHER; note = Phosphorothioate bond
  modified_base 3: mod_base = gm
  modified_base 4: mod_base = OTHER; note = 2'-O-methyl-adenosine
  modified_base 5: mod_base = um
  modified_base 6: mod_base = OTHER; note = 2'-Fluoro-uridine
  modified_base 7: mod_base = um
  modified_base 8: mod_base = OTHER; note = 2'-Fluoro-uridine
  modified_base 9: mod_base = OTHER; note = 2'-Fluoro-adenosine
  modified_base 10: mod_base = cm
  modified_base 11: mod_base = OTHER; note = 2'-O-methyl-adenosine
  modified_base 12: mod_base = cm
  modified_base 13: mod_base = um
  modified_base 14: mod_base = OTHER; note = 2'-Fluoro-guanosine
  modified_base 15: mod_base = cm
  modified_base 16: mod_base = OTHER; note = 2'-Fluoro-adenosine
  modified_base 17: mod_base = gm
  modified_base 18: mod_base = um
  modified_base 19: mod_base = gm
  modified_base 20: mod_base = OTHER; note = 2'-Fluoro-adenosine
  modified_base 21: mod_base = cm
  modified_base 21^22: mod_base = OTHER; note = Phosphorothioate bond
  modified_base 22: mod_base = um
  modified_base 22^23: mod_base = OTHER; note = Phosphorothioate bond
  modified_base 23: mod_base = um
gagattttacactgcagtgactt

SEQ ID NO: 748 - RNA, 23 nt, synthetic construct
  source 1..23: mol_type = other RNA
  modified_base 1: mod_base = um
  modified_base 1^2: mod_base = OTHER; note = Phosphorothioate bond
  modified_base 2: mod_base = OTHER; note = 2'-Fluoro-uridine
  modified_base 2^3: mod_base = OTHER; note = Phosphorothioate bond
  modified_base 3: mod_base = um
  modified_base 4: mod_base = gm
  modified_base 5: mod_base = um
  modified_base 6: mod_base = OTHER; note = 2'-Fluoro-adenosine
  modified_base 7: mod_base = OTHER; note = 2'-O-methyl-adenosine
  modified_base 8: mod_base = OTHER; note = 2'-Fluoro-adenosine
  modified_base 9: mod_base = OTHER; note = 2'-Fluoro-adenosine
  modified_base 10: mod_base = um
  modified_base 11: mod_base = um
  modified_base 12: mod_base = um
  modified_base 13: mod_base = cm
  modified_base 14: mod_base = OTHER; note = 2'-Fluoro-adenosine
  modified_base 15: mod_base = cm
  modified_base 16: mod_base = OTHER; note = 2'-Fluoro-cytidine
  modified_base 17: mod_base = OTHER; note = 2'-O-methyl-adenosine
  modified_base 18: mod_base = gm
  modified_base 19: mod_base = cm
  modified_base 20: mod_base = OTHER; note = 2'-Fluoro-uridine
  modified_base 21: mod_base = gm
  modified_base 21^22: mod_base = OTHER; note = Phosphorothioate bond
  modified_base 22: mod_base = um
  modified_base 22^23: mod_base = OTHER; note = Phosphorothioate bond
  modified_base 23: mod_base = um
tttgtaaaatttcaccagctgtt

SEQ ID NO: 749 - RNA, 23 nt, synthetic construct
  source 1..23: mol_type = other RNA
  modified_base 1: mod_base = um
  modified_base 1^2: mod_base = OTHER; note = Phosphorothioate bond
  modified_base 2: mod_base = OTHER; note = 2'-Fluoro-adenosine
  modified_base 2^3: mod_base = OTHER; note = Phosphorothioate bond
  modified_base 3: mod_base = OTHER; note = 2'-O-methyl-adenosine
  modified_base 4: mod_base = um
  modified_base 5: mod_base = OTHER; note = 2'-O-methyl-adenosine
  modified_base 6: mod_base = OTHER; note = 2'-Fluoro-guanosine
  modified_base 7: mod_base = um
  modified_base 8: mod_base = OTHER; note = 2'-Fluoro-cytidine
  modified_base 9: mod_base = OTHER; note = 2'-Fluoro-uridine
  modified_base 10: mod_base = um
  modified_base 11: mod_base = um
  modified_base 12: mod_base = OTHER; note = 2'-O-methyl-adenosine
  modified_base 13: mod_base = um
  modified_base 14: mod_base = OTHER; note = 2'-Fluoro-cytidine
  modified_base 15: mod_base = OTHER; note = 2'-O-methyl-adenosine
  modified_base 16: mod_base = OTHER; note = 2'-Fluoro-uridine
  modified_base 17: mod_base = cm
  modified_base 18: mod_base = cm
  modified_base 19: mod_base = OTHER; note = 2'-O-methyl-adenosine
  modified_base 20: mod_base = OTHER; note = 2'-Fluoro-uridine
  modified_base 21: mod_base = OTHER; note = 2'-O-methyl-adenosine
  modified_base 21^22: mod_base = OTHER; note = Phosphorothioate bond
  modified_base 22: mod_base = OTHER; note = 2'-O-methyl-adenosine
  modified_base 22^23: mod_base = OTHER; note = Phosphorothioate bond
  modified_base 23: mod_base = OTHER; note = 2'-O-methyl-adenosine
taatagtctttatcatccataaa

SEQ ID NO: 750 - RNA, 23 nt, synthetic construct
  source 1..23: mol_type = other RNA
  modified_base 1: mod_base = OTHER; note = 2'-O-methyl-adenosine
  modified_base 1^2: mod_base = OTHER; note = Phosphorothioate bond
  modified_base 2: mod_base = OTHER; note = 2'-Fluoro-cytidine
  modified_base 2^3: mod_base = OTHER; note = Phosphorothioate bond
  modified_base 3: mod_base = OTHER; note = 2'-O-methyl-adenosine
  modified_base 4: mod_base = um
  modified_base 5: mod_base = um
  modified_base 6: mod_base = OTHER; note = 2'-Fluoro-cytidine
  modified_base 7: mod_base = um
  modified_base 8: mod_base = OTHER; note = 2'-Fluoro-guanosine
  modified_base 9: mod_base = OTHER; note = 2'-Fluoro-adenosine
  modified_base 10: mod_base = um
  modified_base 11: mod_base = OTHER; note = 2'-O-methyl-adenosine
  modified_base 12: mod_base = OTHER; note = 2'-O-methyl-adenosine
  modified_base 13: mod_base = OTHER; note = 2'-O-methyl-adenosine
  modified_base 14: mod_base = OTHER; note = 2'-Fluoro-uridine
  modified_base 15: mod_base = cm
  modified_base 16: mod_base = OTHER; note = 2'-Fluoro-uridine
  modified_base 17: mod_base = um
  modified_base 18: mod_base = OTHER; note = 2'-O-methyl-adenosine
  modified_base 19: mod_base = gm
  modified_base 20: mod_base = OTHER; note = 2'-Fluoro-cytidine
  modified_base 21: mod_base = um
  modified_base 21^22: mod_base = OTHER; note = Phosphorothioate bond
  modified_base 22: mod_base = gm
  modified_base 22^23: mod_base = OTHER; note = Phosphorothioate bond
  modified_base 23: mod_base = gm
acattctgataaatcttagctgg

SEQ ID NO: 751 - RNA, 23 nt, synthetic construct
  source 1..23: mol_type = other RNA
  modified_base 1: mod_base = um
  modified_base 1^2: mod_base = OTHER; note = Phosphorothioate bond
  modified_base 2: mod_base = OTHER; note = 2'-Fluoro-adenosine
  modified_base 2^3: mod_base = OTHER; note = Phosphorothioate bond
  modified_base 3: mod_base = cm
  modified_base 4: mod_base = OTHER; note = 2'-O-methyl-adenosine
  modified_base 5: mod_base = um
  modified_base 6: mod_base = OTHER; note = 2'-Fluoro-uridine
  modified_base 7: mod_base = um
  modified_base 8: mod_base = OTHER; note = 2'-Fluoro-uridine
  modified_base 9: mod_base = OTHER; note = 2'-Fluoro-cytidine
  modified_base 10: mod_base = um
  modified_base 11: mod_base = gm
  modified_base 12: mod_base = gm
  modified_base 13: mod_base = OTHER; note = 2'-O-methyl-adenosine
  modified_base 14: mod_base = OTHER; note = 2'-Fluoro-adenosine
  modified_base 15: mod_base = um
  modified_base 16: mod_base = OTHER; note = 2'-Fluoro-guanosine
  modified_base 17: mod_base = um
  modified_base 18: mod_base = OTHER; note = 2'-O-methyl-adenosine
  modified_base 19: mod_base = um
  modified_base 20: mod_base = OTHER; note = 2'-Fluoro-uridine
  modified_base 21: mod_base = cm
  modified_base 21^22: mod_base = OTHER; note = Phosphorothioate bond
  modified_base 22: mod_base = um
  modified_base 22^23: mod_base = OTHER; note = Phosphorothioate bond
  modified_base 23: mod_base = OTHER; note = 2'-O-methyl-adenosine
tacattttctggaatgtattcta

SEQ ID NO: 752 - RNA, 23 nt, synthetic construct
  source 1..23: mol_type = other RNA
  modified_base 1: mod_base = OTHER; note = 2'-O-methyl-adenosine
  modified_base 1^2: mod_base = OTHER; note = Phosphorothioate bond
  modified_base 2: mod_base = OTHER; note = 2'-Fluoro-adenosine
  modified_base 2^3: mod_base = OTHER; note = Phosphorothioate bond
  modified_base 3: mod_base = um
  modified_base 4: mod_base = um
  modified_base 5: mod_base = cm
  modified_base 6: mod_base = OTHER; note = 2'-Fluoro-uridine
  modified_base 7: mod_base = um
  modified_base 8: mod_base = OTHER; note = 2'-Fluoro-uridine
  modified_base 9: mod_base = OTHER; note = 2'-Fluoro-cytidine
  modified_base 10: mod_base = gm
  modified_base 11: mod_base = um
  modified_base 12: mod_base = cm
  modified_base 13: mod_base = gm
  modified_base 14: mod_base = OTHER; note = 2'-Fluoro-adenosine
  modified_base 15: mod_base = OTHER; note = 2'-O-methyl-adenosine
  modified_base 16: mod_base = OTHER; note = 2'-Fluoro-uridine
  modified_base 17: mod_base = cm
  modified_base 18: mod_base = um
  modified_base 19: mod_base = um
  modified_base 20: mod_base = OTHER; note = 2'-Fluoro-adenosine
  modified_base 21: mod_base = um
  modified_base 21^22: mod_base = OTHER; note = Phosphorothioate bond
  modified_base 22: mod_base = cm
  modified_base 22^23: mod_base = OTHER; note = Phosphorothioate bond
  modified_base 23: mod_base = OTHER; note = 2'-O-methyl-adenosine
aattctttcgtcgaatcttatca

SEQ ID NO: 753 - RNA, 23 nt, synthetic construct
  source 1..23: mol_type = other RNA
  modified_base 1: mod_base = OTHER; note = 2'-O-methyl-adenosine
  modified_base 1^2: mod_base = OTHER; note = Phosphorothioate bond
  modified_base 2: mod_base = OTHER; note = 2'-Fluoro-uridine
  modified_base 2^3: mod_base = OTHER; note = Phosphorothioate bond
  modified_base 3: mod_base = um
  modified_base 4: mod_base = gm
  modified_base 5: mod_base = OTHER; note = 2'-O-methyl-adenosine
  modified_base 6: mod_base = OTHER; note = 2'-Fluoro-guanosine
  modified_base 7: mod_base = gm
  modified_base 8: mod_base = OTHER; note = 2'-Fluoro-adenosine
  modified_base 9: mod_base = OTHER; note = 2'-Fluoro-uridine
  modified_base 10: mod_base = um
  modified_base 11: mod_base = um
  modified_base 12: mod_base = cm
  modified_base 13: mod_base = OTHER; note = 2'-O-methyl-adenosine
  modified_base 14: mod_base = OTHER; note = 2'-Fluoro-uridine
  modified_base 15: mod_base = gm
  modified_base 16: mod_base = OTHER; note = 2'-Fluoro-cytidine
  modified_base 17: mod_base = um
  modified_base 18: mod_base = OTHER; note = 2'-O-methyl-adenosine
  modified_base 19: mod_base = cm
  modified_base 20: mod_base = OTHER; note = 2'-Fluoro-uridine
  modified_base 21: mod_base = um
  modified_base 21^22: mod_base = OTHER; note = Phosphorothioate bond
  modified_base 22: mod_base = OTHER; note = 2'-O-methyl-adenosine
  modified_base 22^23: mod_base = OTHER; note = Phosphorothioate bond
  modified_base 23: mod_base = OTHER; note = 2'-O-methyl-adenosine
attgaggatttcatgctacttaa

SEQ ID NO: 754 - RNA, 23 nt, synthetic construct
  source 1..23: mol_type = other RNA
  modified_base 1: mod_base = OTHER; note = 2'-O-methyl-adenosine
  modified_base 1^2: mod_base = OTHER; note = Phosphorothioate bond
  modified_base 2: mod_base = OTHER; note = 2'-Fluoro-cytidine
  modified_base 2^3: mod_base = OTHER; note = Phosphorothioate bond
  modified_base 3: mod_base = OTHER; note = 2'-O-methyl-adenosine
  modified_base 4: mod_base = gm
  modified_base 5: mod_base = gm
  modified_base 6: mod_base = OTHER; note = 2'-Fluoro-adenosine
  modified_base 7: mod_base = gm
  modified_base 8: mod_base = OTHER; note = 2'-Fluoro-guanosine
  modified_base 9: mod_base = OTHER; note = 2'-Fluoro-adenosine
  modified_base 10: mod_base = OTHER; note = 2'-O-methyl-adenosine
  modified_base 11: mod_base = OTHER; note = 2'-O-methyl-adenosine
  modified_base 12: mod_base = gm
  modified_base 13: mod_base = gm
  modified_base 14: mod_base = OTHER; note = 2'-Fluoro-adenosine
  modified_base 15: mod_base = OTHER; note = 2'-O-methyl-adenosine
  modified_base 16: mod_base = OTHER; note = 2'-Fluoro-cytidine
  modified_base 17: mod_base = um
  modified_base 18: mod_base = cm
  modified_base 19: mod_base = OTHER; note = 2'-O-methyl-adenosine
  modified_base 20: mod_base = OTHER; note = 2'-Fluoro-guanosine
  modified_base 21: mod_base = gm
  modified_base 21^22: mod_base = OTHER; note = Phosphorothioate bond
  modified_base 22: mod_base = um
  modified_base 22^23: mod_base = OTHER; note = Phosphorothioate bond
  modified_base 23: mod_base = gm
acaggaggaaaggaactcaggtg

SEQ ID NO: 755 - RNA, 23 nt, synthetic construct
  source 1..23: mol_type = other RNA
  modified_base 1: mod_base = um
  modified_base 1^2: mod_base = OTHER; note = Phosphorothioate bond
  modified_base 2: mod_base = OTHER; note = 2'-Fluoro-uridine
  modified_base 2^3: mod_base = OTHER; note = Phosphorothioate bond
  modified_base 3: mod_base = gm
  modified_base 4: mod_base = OTHER; note = 2'-O-methyl-adenosine
  modified_base 5: mod_base = OTHER; note = 2'-O-methyl-adenosine
  modified_base 6: mod_base = OTHER; note = 2'-Fluoro-guanosine
  modified_base 7: mod_base = OTHER; note = 2'-O-methyl-adenosine
  modified_base 8: mod_base = OTHER; note = 2'-Fluoro-adenosine
  modified_base 9: mod_base = OTHER; note = 2'-Fluoro-adenosine
  modified_base 10: mod_base = OTHER; note = 2'-O-methyl-adenosine
  modified_base 11: mod_base = cm
  modified_base 12: mod_base = um
  modified_base 13: mod_base = um
  modified_base 14: mod_base = OTHER; note = 2'-Fluoro-uridine
  modified_base 15: mod_base = gm
  modified_base 16: mod_base = OTHER; note = 2'-Fluoro-cytidine
  modified_base 17: mod_base = OTHER; note = 2'-O-methyl-adenosine
  modified_base 18: mod_base = gm
  modified_base 19: mod_base = cm
  modified_base 20: mod_base = OTHER; note = 2'-Fluoro-uridine
  modified_base 21: mod_base = gm
  modified_base 21^22: mod_base = OTHER; note = Phosphorothioate bond
  modified_base 22: mod_base = cm
  modified_base 22^23: mod_base = OTHER; note = Phosphorothioate bond
  modified_base 23: mod_base = cm
ttgaagaaaactttgcagctgcc

SEQ ID NO: 756 - RNA, 23 nt, synthetic construct
  source 1..23: mol_type = other RNA
  modified_base 1: mod_base = gm
  modified_base 1^2: mod_base = OTHER; note = Phosphorothioate bond
  modified_base 2: mod_base = OTHER; note = 2'-Fluoro-adenosine
  modified_base 2^3: mod_base = OTHER; note = Phosphorothioate bond
  modified_base 3: mod_base = OTHER; note = 2'-O-methyl-adenosine
  modified_base 4: mod_base = OTHER; note = 2'-O-methyl-adenosine
  modified_base 5: mod_base = um
  modified_base 6: mod_base = OTHER; note = 2'-Fluoro-uridine
  modified_base 7: mod_base = gm
  modified_base 8: mod_base = OTHER; note = 2'-Fluoro-adenosine
  modified_base 9: mod_base = OTHER; note = 2'-Fluoro-guanosine
  modified_base 10: mod_base = gm
  modified_base 11: mod_base = OTHER; note = 2'-O-methyl-adenosine
  modified_base 12: mod_base = um
  modified_base 13: mod_base = um
  modified_base 14: mod_base = OTHER; note = 2'-Fluoro-uridine
  modified_base 15: mod_base = cm
  modified_base 16: mod_base = OTHER; note = 2'-Fluoro-adenosine
  modified_base 17: mod_base = um
  modified_base 18: mod_base = gm
  modified_base 19: mod_base = cm
  modified_base 20: mod_base = OTHER; note = 2'-Fluoro-uridine
  modified_base 21: mod_base = OTHER; note = 2'-O-methyl-adenosine
  modified_base 21^22: mod_base = OTHER; note = Phosphorothioate bond
  modified_base 22: mod_base = cm
  modified_base 22^23: mod_base = OTHER; note = Phosphorothioate bond
  modified_base 23: mod_base = um
gaaattgaggatttcatgctact

SEQ ID NO: 757 - RNA, 23 nt, synthetic construct
  source 1..23: mol_type = other RNA
  modified_base 1: mod_base = um
  modified_base 1^2: mod_base = OTHER; note = Phosphorothioate bond
  modified_base 2: mod_base = OTHER; note = 2'-Fluoro-adenosine
  modified_base 2^3: mod_base = OTHER; note = Phosphorothioate bond
  modified_base 3: mod_base = um
  modified_base 4: mod_base = um
  modified_base 5: mod_base = um
  modified_base 6: mod_base = OTHER; note = 2'-Fluoro-uridine
  modified_base 7: mod_base = gm
  modified_base 8: mod_base = OTHER; note = 2'-Fluoro-cytidine
  modified_base 9: mod_base = OTHER; note = 2'-Fluoro-uridine
  modified_base 10: mod_base = OTHER; note = 2'-O-methyl-adenosine
  modified_base 11: mod_base = um
  modified_base 12: mod_base = um
  modified_base 13: mod_base = um
  modified_base 14: mod_base = OTHER; note = 2'-Fluoro-cytidine
  modified_base 15: mod_base = cm
  modified_base 16: mod_base = OTHER; note = 2'-Fluoro-uridine
  modified_base 17: mod_base = cm
  modified_base 18: mod_base = cm
  modified_base 19: mod_base = um
  modified_base 20: mod_base = OTHER; note = 2'-Fluoro-adenosine
  modified_base 21: mod_base = gm
  modified_base 21^22: mod_base = OTHER; note = Phosphorothioate bond
  modified_base 22: mod_base = OTHER; note = 2'-O-methyl-adenosine
  modified_base 22^23: mod_base = OTHER; note = Phosphorothioate bond
  modified_base 23: mod_base = cm
tattttgctatttcctcctagac

SEQ ID NO: 758 - RNA, 23 nt, synthetic construct
  source 1..23: mol_type = other RNA
  modified_base 1: mod_base = um
  modified_base 1^2: mod_base = OTHER; note = Phosphorothioate bond
  modified_base 2: mod_base = OTHER; note = 2'-Fluoro-uridine
  modified_base 2^3: mod_base = OTHER; note = Phosphorothioate bond
  modified_base 3: mod_base = cm
  modified_base 4: mod_base = cm
  modified_base 5: mod_base = OTHER; note = 2'-O-methyl-adenosine
  modified_base 6: mod_base = OTHER; note = 2'-Fluoro-guanosine
  modified_base 7: mod_base = cm
  modified_base 8: mod_base = OTHER; note = 2'-Fluoro-uridine
  modified_base 9: mod_base = OTHER; note = 2'-Fluoro-cytidine
  modified_base 10: mod_base = OTHER; note = 2'-O-methyl-adenosine
  modified_base 11: mod_base = gm
  modified_base 12: mod_base = um
  modified_base 13: mod_base = um
  modified_base 14: mod_base = OTHER; note = 2'-Fluoro-uridine
  modified_base 15: mod_base = um
  modified_base 16: mod_base = OTHER; note = 2'-Fluoro-adenosine
  modified_base 17: mod_base = OTHER; note = 2'-O-methyl-adenosine
  modified_base 18: mod_base = um
  modified_base 19: mod_base = OTHER; note = 2'-O-methyl-adenosine
  modified_base 20: mod_base = OTHER; note = 2'-Fluoro-uridine
  modified_base 21: mod_base = cm
  modified_base 21^22: mod_base = OTHER; note = Phosphorothioate bond
  modified_base 22: mod_base = OTHER; note = 2'-O-methyl-adenosine
  modified_base 22^23: mod_base = OTHER; note = Phosphorothioate bond
  modified_base 23: mod_base = gm
ttccagctcagttttaatatcag

SEQ ID NO: 759 - RNA, 23 nt, synthetic construct
  source 1..23: mol_type = other RNA
  modified_base 1: mod_base = um
  modified_base 1^2: mod_base = OTHER; note = Phosphorothioate bond
  modified_base 2: mod_base = OTHER; note = 2'-Fluoro-uridine
  modified_base 2^3: mod_base = OTHER; note = Phosphorothioate bond
  modified_base 3: mod_base = um
  modified_base 4: mod_base = OTHER; note = 2'-O-methyl-adenosine
  modified_base 5: mod_base = um
  modified_base 6: mod_base = OTHER; note = 2'-Fluoro-guanosine
  modified_base 7: mod_base = um
  modified_base 8: mod_base = OTHER; note = 2'-Fluoro-adenosine
  modified_base 9: mod_base = OTHER; note = 2'-Fluoro-cytidine
  modified_base 10: mod_base = um
  modified_base 11: mod_base = gm
  modified_base 12: mod_base = gm
  modified_base 13: mod_base = OTHER; note = 2'-O-methyl-adenosine
  modified_base 14: mod_base = OTHER; note = 2'-Fluoro-cytidine
  modified_base 15: mod_base = OTHER; note = 2'-O-methyl-adenosine
  modified_base 16: mod_base = OTHER; note = 2'-Fluoro-adenosine
  modified_base 17: mod_base = um
  modified_base 18: mod_base = OTHER; note = 2'-O-methyl-adenosine
  modified_base 19: mod_base = um
  modified_base 20: mod_base = OTHER; note = 2'-Fluoro-uridine
  modified_base 21: mod_base = OTHER; note = 2'-O-methyl-adenosine
  modified_base 21^22: mod_base = OTHER; note = Phosphorothioate bond
  modified_base 22: mod_base = OTHER; note = 2'-O-methyl-adenosine
  modified_base 22^23: mod_base = OTHER; note = Phosphorothioate bond
  modified_base 23: mod_base = gm
tttatgtactggacaatattaag

SEQ ID NO: 760 - RNA, 23 nt, synthetic construct
  source 1..23: mol_type = other RNA
  modified_base 1: mod_base = um
  modified_base 1^2: mod_base = OTHER; note = Phosphorothioate bond
  modified_base 2: mod_base = OTHER; note = 2'-Fluoro-cytidine
  modified_base 2^3: mod_base = OTHER; note = Phosphorothioate bond
  modified_base 3: mod_base = OTHER; note = 2'-O-methyl-adenosine
  modified_base 4: mod_base = OTHER; note = 2'-O-methyl-adenosine
  modified_base 5: mod_base = cm
  modified_base 6: mod_base = OTHER; note = 2'-Fluoro-adenosine
  modified_base 7: mod_base = um
  modified_base 8: mod_base = OTHER; note = 2'-Fluoro-uridine
  modified_base 9: mod_base = OTHER; note = 2'-Fluoro-cytidine
  modified_base 10: mod_base = um
  modified_base 11: mod_base = gm
  modified_base 12: mod_base = OTHER; note = 2'-O-methyl-adenosine
  modified_base 13: mod_base = um
  modified_base 14: mod_base = OTHER; note = 2'-Fluoro-adenosine
  modified_base 15: mod_base = OTHER; note = 2'-O-methyl-adenosine
  modified_base 16: mod_base = OTHER; note = 2'-Fluoro-adenosine
  modified_base 17: mod_base = um
  modified_base 18: mod_base = cm
  modified_base 19: mod_base = um
  modified_base 20: mod_base = OTHER; note = 2'-Fluoro-uridine
  modified_base 21: mod_base = OTHER; note = 2'-O-methyl-adenosine
  modified_base 21^22: mod_base = OTHER; note = Phosphorothioate bond
  modified_base 22: mod_base = gm
  modified_base 22^23: mod_base = OTHER; note = Phosphorothioate bond
  modified_base 23: mod_base = cm
tcaacattctgataaatcttagc

SEQ ID NO: 761 - RNA, 23 nt, synthetic construct
  source 1..23: mol_type = other RNA
  modified_base 1: mod_base = OTHER; note = 2'-O-methyl-adenosine
  modified_base 1^2: mod_base = OTHER; note = Phosphorothioate bond
  modified_base 2: mod_base = OTHER; note = 2'-Fluoro-uridine
  modified_base 2^3: mod_base = OTHER; note = Phosphorothioate bond
  modified_base 3: mod_base = um
  modified_base 4: mod_base = um
  modified_base 5: mod_base = cm
  modified_base 6: mod_base = OTHER; note = 2'-Fluoro-cytidine
  modified_base 7: mod_base = um
  modified_base 8: mod_base = OTHER; note = 2'-Fluoro-uridine
  modified_base 9: mod_base = OTHER; note = 2'-Fluoro-uridine
  modified_base 10: mod_base = gm
  modified_base 11: mod_base = um
  modified_base 12: mod_base = OTHER; note = 2'-O-methyl-adenosine
  modified_base 13: mod_base = OTHER; note = 2'-O-methyl-adenosine
  modified_base 14: mod_base = OTHER; note = 2'-Fluoro-adenosine
  modified_base 15: mod_base = OTHER; note = 2'-O-methyl-adenosine
  modified_base 16: mod_base = OTHER; note = 2'-Fluoro-uridine
  modified_base 17: mod_base = um
  modified_base 18: mod_base = um
  modified_base 19: mod_base = cm
  modified_base 20: mod_base = OTHER; note = 2'-Fluoro-adenosine
  modified_base 21: mod_base = cm
  modified_base 21^22: mod_base = OTHER; note = Phosphorothioate bond
  modified_base 22: mod_base = cm
  modified_base 22^23: mod_base = OTHER; note = Phosphorothioate bond
  modified_base 23: mod_base = OTHER; note = 2'-O-methyl-adenosine
atttcctttgtaaaatttcacca

SEQ ID NO: 762 - RNA, 23 nt, synthetic construct
  source 1..23: mol_type = other RNA
  modified_base 1: mod_base = um
  modified_base 1^2: mod_base = OTHER; note = Phosphorothioate bond
  modified_base 2: mod_base = OTHER; note = 2'-Fluoro-guanosine
  modified_base 2^3: mod_base = OTHER; note = Phosphorothioate bond
  modified_base 3: mod_base = OTHER; note = 2'-O-methyl-adenosine
  modified_base 4: mod_base = gm
  modified_base 5: mod_base = gm
  modified_base 6: mod_base = OTHER; note = 2'-Fluoro-adenosine
  modified_base 7: mod_base = um
  modified_base 8: mod_base = OTHER; note = 2'-Fluoro-uridine
  modified_base 9: mod_base = OTHER; note = 2'-Fluoro-uridine
  modified_base 10: mod_base = cm
  modified_base 11: mod_base = OTHER; note = 2'-O-methyl-adenosine
  modified_base 12: mod_base = um
  modified_base 13: mod_base = gm
  modified_base 14: mod_base = OTHER; note = 2'-Fluoro-cytidine
  modified_base 15: mod_base = um
  modified_base 16: mod_base = OTHER; note = 2'-Fluoro-adenosine
  modified_base 17: mod_base = cm
  modified_base 18: mod_base = um
  modified_base 19: mod_base = um
  modified_base 20: mod_base = OTHER; note = 2'-Fluoro-adenosine
  modified_base 21: mod_base = OTHER; note = 2'-O-methyl-adenosine
  modified_base 21^22: mod_base = OTHER; note = Phosphorothioate bond
  modified_base 22: mod_base = cm
  modified_base 22^23: mod_base = OTHER; note = Phosphorothioate bond
  modified_base 23: mod_base = gm
tgaggatttcatgctacttaacg

SEQ ID NO: 763 - RNA, 23 nt, synthetic construct
  source 1..23: mol_type = other RNA
  modified_base 1: mod_base = OTHER; note = 2'-O-methyl-adenosine
  modified_base 1^2: mod_base = OTHER; note = Phosphorothioate bond
  modified_base 2: mod_base = OTHER; note = 2'-Fluoro-guanosine
  modified_base 2^3: mod_base = OTHER; note = Phosphorothioate bond
  modified_base 3: mod_base = OTHER; note = 2'-O-methyl-adenosine
  modified_base 4: mod_base = cm
  modified_base 5: mod_base = um
  modified_base 6: mod_base = OTHER; note = 2'-Fluoro-guanosine
  modified_base 7: mod_base = gm
  modified_base 8: mod_base = OTHER; note = 2'-Fluoro-adenosine
  modified_base 9: mod_base = OTHER; note = 2'-Fluoro-guanosine
  modified_base 10: mod_base = OTHER; note = 2'-O-methyl-adenosine
  modified_base 11: mod_base = um
  modified_base 12: mod_base = um
  modified_base 13: mod_base = um
  modified_base 14: mod_base = OTHER; note = 2'-Fluoro-uridine
  modified_base 15: mod_base = OTHER; note = 2'-O-methyl-adenosine
  modified_base 16: mod_base = OTHER; note = 2'-Fluoro-cytidine
  modified_base 17: mod_base = OTHER; note = 2'-O-methyl-adenosine
  modified_base 18: mod_base = cm
  modified_base 19: mod_base = um
  modified_base 20: mod_base = OTHER; note = 2'-Fluoro-guanosine
  modified_base 21: mod_base = cm
  modified_base 21^22: mod_base = OTHER; note = Phosphorothioate bond
  modified_base 22: mod_base = OTHER; note = 2'-O-methyl-adenosine
  modified_base 22^23: mod_base = OTHER; note = Phosphorothioate bond
  modified_base 23: mod_base = gm
agactggagattttacactgcag

SEQ ID NO: 764 - RNA, 23 nt, synthetic construct
  source 1..23: mol_type = other RNA
  modified_base 1: mod_base = um
  modified_base 1^2: mod_base = OTHER; note = Phosphorothioate bond
  modified_base 2: mod_base = OTHER; note = 2'-Fluoro-adenosine
  modified_base 2^3: mod_base = OTHER; note = Phosphorothioate bond
  modified_base 3: mod_base = gm
  modified_base 4: mod_base = um
  modified_base 5: mod_base = OTHER; note = 2'-O-methyl-adenosine
  modified_base 6: mod_base = OTHER; note = 2'-Fluoro-guanosine
  modified_base 7: mod_base = cm
  modified_base 8: mod_base = OTHER; note = 2'-Fluoro-adenosine
  modified_base 9: mod_base = OTHER; note = 2'-Fluoro-guanosine
  modified_base 10: mod_base = cm
  modified_base 11: mod_base = OTHER; note = 2'-O-methyl-adenosine
  modified_base 12: mod_base = OTHER; note = 2'-O-methyl-adenosine
  modified_base 13: mod_base = OTHER; note = 2'-O-methyl-adenosine
  modified_base 14: mod_base = OTHER; note = 2'-Fluoro-adenosine
  modified_base 15: mod_base = cm
  modified_base 16: mod_base = OTHER; note = 2'-Fluoro-uridine
  modified_base 17: mod_base = um
  modified_base 18: mod_base = um
  modified_base 19: mod_base = cm
  modified_base 20: mod_base = OTHER; note = 2'-Fluoro-adenosine
  modified_base 21: mod_base = um
  modified_base 21^22: mod_base = OTHER; note = Phosphorothioate bond
  modified_base 22: mod_base = gm
  modified_base 22^23: mod_base = OTHER; note = Phosphorothioate bond
  modified_base 23: mod_base = OTHER; note = 2'-O-methyl-adenosine
tagtagcagcaaaactttcatga

SEQ ID NO: 765 - RNA, 23 nt, synthetic construct
  source 1..23: mol_type = other RNA
  modified_base 1: mod_base = OTHER; note = 2'-O-methyl-adenosine
  modified_base 1^2: mod_base = OTHER; note = Phosphorothioate bond
  modified_base 2: mod_base = OTHER; note = 2'-Fluoro-uridine
  modified_base 2^3: mod_base = OTHER; note = Phosphorothioate bond
  modified_base 3: mod_base = um
  modified_base 4: mod_base = cm
  modified_base 5: mod_base = cm
  modified_base 6: mod_base = OTHER; note = 2'-Fluoro-adenosine
  modified_base 7: mod_base = gm
  modified_base 8: mod_base = OTHER; note = 2'-Fluoro-cytidine
  modified_base 9: mod_base = OTHER; note = 2'-Fluoro-uridine
  modified_base 10: mod_base = cm
  modified_base 11: mod_base = OTHER; note = 2'-O-methyl-adenosine
  modified_base 12: mod_base = gm
  modified_base 13: mod_base = um
  modified_base 14: mod_base = OTHER; note = 2'-Fluoro-uridine
  modified_base 15: mod_base = um
  modified_base 16: mod_base = OTHER; note = 2'-Fluoro-uridine
  modified_base 17: mod_base = OTHER; note = 2'-O-methyl-adenosine
  modified_base 18: mod_base = OTHER; note = 2'-O-methyl-adenosine
  modified_base 19: mod_base = um
  modified_base 20: mod_base = OTHER; note = 2'-Fluoro-adenosine
  modified_base 21: mod_base = um
  modified_base 21^22: mod_base = OTHER; note = Phosphorothioate bond
  modified_base 22: mod_base = cm
  modified_base 22^23: mod_base = OTHER; note = Phosphorothioate bond
  modified_base 23: mod_base = OTHER; note = 2'-O-methyl-adenosine
attccagctcagttttaatatca

SEQ ID NO: 766 - RNA, 23 nt, synthetic construct
  source 1..23: mol_type = other RNA
  modified_base 1: mod_base = OTHER; note = 2'-O-methyl-adenosine
  modified_base 1^2: mod_base = OTHER; note = Phosphorothioate bond
  modified_base 2: mod_base = OTHER; note = 2'-Fluoro-guanosine
  modified_base 2^3: mod_base = OTHER; note = Phosphorothioate bond
  modified_base 3: mod_base = gm
  modified_base 4: mod_base = OTHER; note = 2'-O-methyl-adenosine
  modified_base 5: mod_base = um
  modified_base 6: mod_base = OTHER; note = 2'-Fluoro-uridine
  modified_base 7: mod_base = um
  modified_base 8: mod_base = OTHER; note = 2'-Fluoro-cytidine
  modified_base 9: mod_base = OTHER; note = 2'-Fluoro-adenosine
  modified_base 10: mod_base = um
  modified_base 11: mod_base = gm
  modified_base 12: mod_base = cm
  modified_base 13: mod_base = um
  modified_base 14: mod_base = OTHER; note = 2'-Fluoro-adenosine
  modified_base 15: mod_base = cm
  modified_base 16: mod_base = OTHER; note = 2'-Fluoro-uridine
  modified_base 17: mod_base = um
  modified_base 18: mod_base = OTHER; note = 2'-O-methyl-adenosine
  modified_base 19: mod_base = OTHER; note = 2'-O-methyl-adenosine
  modified_base 20: mod_base = OTHER; note = 2'-Fluoro-cytidine
  modified_base 21: mod_base = gm
  modified_base 21^22: mod_base = OTHER; note = Phosphorothioate bond
  modified_base 22: mod_base = gm
  modified_base 22^23: mod_base = OTHER; note = Phosphorothioate bond
  modified_base 23: mod_base = OTHER; note = 2'-O-methyl-adenosine
aggatttcatgctacttaacgga

SEQ ID NO: 767 - RNA, 23 nt, synthetic construct
  source 1..23: mol_type = other RNA
  modified_base 1: mod_base = gm
  modified_base 1^2: mod_base = OTHER; note = Phosphorothioate bond
  modified_base 2: mod_base = OTHER; note = 2'-Fluoro-adenosine
  modified_base 2^3: mod_base = OTHER; note = Phosphorothioate bond
  modified_base 3: mod_base = OTHER; note = 2'-O-methyl-adenosine
  modified_base 4: mod_base = gm
  modified_base 5: mod_base = OTHER; note = 2'-O-methyl-adenosine
  modified_base 6: mod_base = OTHER; note = 2'-Fluoro-cytidine
  modified_base 7: mod_base = OTHER; note = 2'-O-methyl-adenosine
  modified_base 8: mod_base = OTHER; note = 2'-Fluoro-uridine
  modified_base 9: mod_base = OTHER; note = 2'-Fluoro-uridine
  modified_base 10: mod_base = um
  modified_base 11: mod_base = cm
  modified_base 12: mod_base = um
  modified_base 13: mod_base = gm
  modified_base 14: mod_base = OTHER; note = 2'-Fluoro-adenosine
  modified_base 15: mod_base = OTHER; note = 2'-O-methyl-adenosine
  modified_base 16: mod_base = OTHER; note = 2'-Fluoro-guanosine
  modified_base 17: mod_base = um
  modified_base 18: mod_base = cm
  modified_base 19: mod_base = um
  modified_base 20: mod_base = OTHER; note = 2'-Fluoro-guanosine
  modified_base 21: mod_base = cm
  modified_base 21^22: mod_base = OTHER; note = Phosphorothioate bond
  modified_base 22: mod_base = OTHER; note = 2'-O-methyl-adenosine
  modified_base 22^23: mod_base = OTHER; note = Phosphorothioate bond
  modified_base 23: mod_base = OTHER; note = 2'-O-methyl-adenosine
gaagacatttctgaagtctgcaa

SEQ ID NO: 768 - RNA, 23 nt, synthetic construct
  source 1..23: mol_type = other RNA
  modified_base 1: mod_base = um
  modified_base 1^2: mod_base = OTHER; note = Phosphorothioate bond
  modified_base 2: mod_base = OTHER; note = 2'-Fluoro-adenosine
  modified_base 2^3: mod_base = OTHER; note = Phosphorothioate bond
  modified_base 3: mod_base = um
  modified_base 4: mod_base = gm
  modified_base 5: mod_base = um
  modified_base 6: mod_base = OTHER; note = 2'-Fluoro-adenosine
  modified_base 7: mod_base = cm
  modified_base 8: mod_base = OTHER; note = 2'-Fluoro-uridine
  modified_base 9: mod_base = OTHER; note = 2'-Fluoro-guanosine
  modified_base 10: mod_base = gm
  modified_base 11: mod_base = OTHER; note = 2'-O-methyl-adenosine
  modified_base 12: mod_base = cm
  modified_base 13: mod_base = OTHER; note = 2'-O-methyl-adenosine
  modified_base 14: mod_base = OTHER; note = 2'-Fluoro-adenosine
  modified_base 15: mod_base = um
  modified_base 16: mod_base = OTHER; note = 2'-Fluoro-adenosine
  modified_base 17: mod_base = um
  modified_base 18: mod_base = um
  modified_base 19: mod_base = OTHER; note = 2'-O-methyl-adenosine
  modified_base 20: mod_base = OTHER; note = 2'-Fluoro-adenosine
  modified_base 21: mod_base = gm
  modified_base 21^22: mod_base = OTHER; note = Phosphorothioate bond
  modified_base 22: mod_base = cm
  modified_base 22^23: mod_base = OTHER; note = Phosphorothioate bond
  modified_base 23: mod_base = um
tatgtactggacaatattaagct

SEQ ID NO: 769 - RNA, 23 nt, synthetic construct
  source 1..23: mol_type = other RNA
  modified_base 1: mod_base = OTHER; note = 2'-O-methyl-adenosine
  modified_base 1^2: mod_base = OTHER; note = Phosphorothioate bond
  modified_base 2: mod_base = OTHER; note = 2'-Fluoro-uridine
  modified_base 2^3: mod_base = OTHER; note = Phosphorothioate bond
  modified_base 3: mod_base = um
  modified_base 4: mod_base = cm
  modified_base 5: mod_base = um
  modified_base 6: mod_base = OTHER; note = 2'-Fluoro-guanosine
  modified_base 7: mod_base = OTHER; note = 2'-O-methyl-adenosine
  modified_base 8: mod_base = OTHER; note = 2'-Fluoro-uridine
  modified_base 9: mod_base = OTHER; note = 2'-Fluoro-adenosine
  modified_base 10: mod_base = OTHER; note = 2'-O-methyl-adenosine
  modified_base 11: mod_base = OTHER; note = 2'-O-methyl-adenosine
  modified_base 12: mod_base = um
  modified_base 13: mod_base = cm
  modified_base 14: mod_base = OTHER; note = 2'-Fluoro-uridine
  modified_base 15: mod_base = um
  modified_base 16: mod_base = OTHER; note = 2'-Fluoro-adenosine
  modified_base 17: mod_base = gm
  modified_base 18: mod_base = cm
  modified_base 19: mod_base = um
  modified_base 20: mod_base = OTHER; note = 2'-Fluoro-guanosine
  modified_base 21: mod_base = gm
  modified_base 21^22: mod_base = OTHER; note = Phosphorothioate bond
  modified_base 22: mod_base = OTHER; note = 2'-O-methyl-adenosine
  modified_base 22^23: mod_base = OTHER; note = Phosphorothioate bond
  modified_base 23: mod_base = cm
attctgataaatcttagctggac

SEQ ID NO: 770 - RNA, 23 nt, synthetic construct
  source 1..23: mol_type = other RNA
  modified_base 1: mod_base = OTHER; note = 2'-O-methyl-adenosine
  modified_base 1^2: mod_base = OTHER; note = Phosphorothioate bond
  modified_base 2: mod_base = OTHER; note = 2'-Fluoro-adenosine
  modified_base 2^3: mod_base = OTHER; note = Phosphorothioate bond
  modified_base 3: mod_base = cm
  modified_base 4: mod_base = OTHER; note = 2'-O-methyl-adenosine
  modified_base 5: mod_base = cm
  modified_base 6: mod_base = OTHER; note = 2'-Fluoro-uridine
  modified_base 7: mod_base = um
  modified_base 8: mod_base = OTHER; note = 2'-Fluoro-cytidine
  modified_base 9: mod_base = OTHER; note = 2'-Fluoro-guanosine
  modified_base 10: mod_base = um
  modified_base 11: mod_base = OTHER; note = 2'-O-methyl-adenosine
  modified_base 12: mod_base = OTHER; note = 2'-O-methyl-adenosine
  modified_base 13: mod_base = OTHER; note = 2'-O-methyl-adenosine
  modified_base 14: mod_base = OTHER; note = 2'-Fluoro-guanosine
  modified_base 15: mod_base = um
  modified_base 16: mod_base = OTHER; note = 2'-Fluoro-adenosine
  modified_base 17: mod_base = gm
  modified_base 18: mod_base = OTHER; note = 2'-O-methyl-adenosine
  modified_base 19: mod_base = gm
  modified_base 20: mod_base = OTHER; note = 2'-Fluoro-cytidine
  modified_base 21: mod_base = um
  modified_base 21^22: mod_base = OTHER; note = Phosphorothioate bond
  modified_base 22: mod_base = um
  modified_base 22^23: mod_base = OTHER; note = Phosphorothioate bond
  modified_base 23: mod_base = gm
aacacttcgtaaagtagagcttg

SEQ ID NO: 771 - RNA, 23 nt, synthetic construct
  source 1..23: mol_type = other RNA
  modified_base 1: mod_base = OTHER; note = 2'-O-methyl-adenosine
  modified_base 1^2: mod_base = OTHER; note = Phosphorothioate bond
  modified_base 2: mod_base = OTHER; note = 2'-Fluoro-adenosine
  modified_base 2^3: mod_base = OTHER; note = Phosphorothioate bond
  modified_base 3: mod_base = cm
  modified_base 4: mod_base = OTHER; note = 2'-O-methyl-adenosine
  modified_base 5: mod_base = um
  modified_base 6: mod_base = OTHER; note = 2'-Fluoro-uridine
  modified_base 7: mod_base = cm
  modified_base 8: mod_base = OTHER; note = 2'-Fluoro-uridine
  modified_base 9: mod_base = OTHER; note = 2'-Fluoro-guanosine
  modified_base 10: mod_base = OTHER; note = 2'-O-methyl-adenosine
  modified_base 11: mod_base = um
  modified_base 12: mod_base = OTHER; note = 2'-O-methyl-adenosine
  modified_base 13: mod_base = OTHER; note = 2'-O-methyl-adenosine
  modified_base 14: mod_base = OTHER; note = 2'-Fluoro-adenosine
  modified_base 15: mod_base = um
  modified_base 16: mod_base = OTHER; note = 2'-Fluoro-cytidine
  modified_base 17: mod_base = um
  modified_base 18: mod_base = um
  modified_base 19: mod_base = OTHER; note = 2'-O-methyl-adenosine
  modified_base 20: mod_base = OTHER; note = 2'-Fluoro-guanosine
  modified_base 21: mod_base = cm
  modified_base 21^22: mod_base = OTHER; note = Phosphorothioate bond
  modified_base 22: mod_base = um
  modified_base 22^23: mod_base = OTHER; note = Phosphorothioate bond
  modified_base 23: mod_base = gm
aacattctgataaatcttagctg

SEQ ID NO: 772 - RNA, 23 nt, synthetic construct
  source 1..23: mol_type = other RNA
  modified_base 1: mod_base = OTHER; note = 2'-O-methyl-adenosine
  modified_base 1^2: mod_base = OTHER; note = Phosphorothioate bond
  modified_base 2: mod_base = OTHER; note = 2'-Fluoro-uridine
  modified_base 2^3: mod_base = OTHER; note = Phosphorothioate bond
  modified_base 3: mod_base = um
  modified_base 4: mod_base = cm
  modified_base 5: mod_base = um
  modified_base 6: mod_base = OTHER; note = 2'-Fluoro-uridine
  modified_base 7: mod_base = gm
  modified_base 8: mod_base = OTHER; note = 2'-Fluoro-cytidine
  modified_base 9: mod_base = OTHER; note = 2'-Fluoro-uridine
  modified_base 10: mod_base = um
  modified_base 11: mod_base = um
  modified_base 12: mod_base = OTHER; note = 2'-O-methyl-adenosine
  modified_base 13: mod_base = um
  modified_base 14: mod_base = OTHER; note = 2'-Fluoro-uridine
  modified_base 15: mod_base = gm
  modified_base 16: mod_base = OTHER; note = 2'-Fluoro-guanosine
  modified_base 17: mod_base = um
  modified_base 18: mod_base = OTHER; note = 2'-O-methyl-adenosine
  modified_base 19: mod_base = cm
  modified_base 20: mod_base = OTHER; note = 2'-Fluoro-uridine
  modified_base 21: mod_base = gm
  modified_base 21^22: mod_base = OTHER; note = Phosphorothioate bond
  modified_base 22: mod_base = OTHER; note = 2'-O-methyl-adenosine
  modified_base 22^23: mod_base = OTHER; note = Phosphorothioate bond
  modified_base 23: mod_base = gm
attcttgctttattggtactgag

SEQ ID NO: 773 - RNA, 23 nt, synthetic construct
  source 1..23: mol_type = other RNA
  modified_base 1: mod_base = OTHER; note = 2'-O-methyl-adenosine
  modified_base 1^2: mod_base = OTHER; note = Phosphorothioate bond
  modified_base 2: mod_base = OTHER; note = 2'-Fluoro-cytidine
  modified_base 2^3: mod_base = OTHER; note = Phosphorothioate bond
  modified_base 3: mod_base = um
  modified_base 4: mod_base = um
  modified_base 5: mod_base = OTHER; note = 2'-O-methyl-adenosine
  modified_base 6: mod_base = OTHER; note = 2'-Fluoro-adenosine
  modified_base 7: mod_base = cm
  modified_base 8: mod_base = OTHER; note = 2'-Fluoro-guanosine
  modified_base 9: mod_base = OTHER; note = 2'-Fluoro-guanosine
  modified_base 10: mod_base = OTHER; note = 2'-O-methyl-adenosine
  modified_base 11: mod_base = cm
  modified_base 12: mod_base = um
  modified_base 13: mod_base = um
  modified_base 14: mod_base = OTHER; note = 2'-Fluoro-guanosine
  modified_base 15: mod_base = OTHER; note = 2'-O-methyl-adenosine
  modified_base 16: mod_base = OTHER; note = 2'-Fluoro-guanosine
  modified_base 17: mod_base = OTHER; note = 2'-O-methyl-adenosine
  modified_base 18: mod_base = gm
  modified_base 19: mod_base = OTHER; note = 2'-O-methyl-adenosine
  modified_base 20: mod_base = OTHER; note = 2'-Fluoro-guanosine
  modified_base 21: mod_base = gm
  modified_base 21^22: mod_base = OTHER; note = Phosphorothioate bond
  modified_base 22: mod_base = OTHER; note = 2'-O-methyl-adenosine
  modified_base 22^23: mod_base = OTHER; note = Phosphorothioate bond
  modified_base 23: mod_base = gm
acttaacggacttgagagaggag

SEQ ID NO: 774 - RNA, 23 nt, synthetic construct
  source 1..23: mol_type = other RNA
  modified_base 1: mod_base = um
  modified_base 1^2: mod_base = OTHER; note = Phosphorothioate bond
  modified_base 2: mod_base = OTHER; note = 2'-Fluoro-uridine
  modified_base 2^3: mod_base = OTHER; note = Phosphorothioate bond
  modified_base 3: mod_base = cm
  modified_base 4: mod_base = gm
  modified_base 5: mod_base = um
  modified_base 6: mod_base = OTHER; note = 2'-Fluoro-adenosine
  modified_base 7: mod_base = OTHER; note = 2'-O-methyl-adenosine
  modified_base 8: mod_base = OTHER; note = 2'-Fluoro-adenosine
  modified_base 9: mod_base = OTHER; note = 2'-Fluoro-guanosine
  modified_base 10: mod_base = um
  modified_base 11: mod_base = OTHER; note = 2'-O-methyl-adenosine
  modified_base 12: mod_base = gm
  modified_base 13: mod_base = OTHER; note = 2'-O-methyl-adenosine
  modified_base 14: mod_base = OTHER; note = 2'-Fluoro-guanosine
  modified_base 15: mod_base = cm
  modified_base 16: mod_base = OTHER; note = 2'-Fluoro-uridine
  modified_base 17: mod_base = um
  modified_base 18: mod_base = gm
  modified_base 19: mod_base = OTHER; note = 2'-O-methyl-adenosine
  modified_base 20: mod_base = OTHER; note = 2'-Fluoro-uridine
  modified_base 21: mod_base = OTHER; note = 2'-O-methyl-adenosine
  modified_base 21^22: mod_base = OTHER; note = Phosphorothioate bond
  modified_base 22: mod_base = cm
  modified_base 22^23: mod_base = OTHER; note = Phosphorothioate bond
  modified_base 23: mod_base = OTHER; note = 2'-O-methyl-adenosine
ttcgtaaagtagagcttgataca

SEQ ID NO: 775 - RNA, 23 nt, synthetic construct
  source 1..23: mol_type = other RNA
  modified_base 1: mod_base = OTHER; note = 2'-O-methyl-adenosine
  modified_base 1^2: mod_base = OTHER; note = Phosphorothioate bond
  modified_base 2: mod_base = OTHER; note = 2'-Fluoro-uridine
  modified_base 2^3: mod_base = OTHER; note = Phosphorothioate bond
  modified_base 3: mod_base = um
  modified_base 4: mod_base = um
  modified_base 5: mod_base = cm
  modified_base 6: mod_base = OTHER; note = 2'-Fluoro-adenosine
  modified_base 7: mod_base = cm
  modified_base 8: mod_base = OTHER; note = 2'-Fluoro-cytidine
  modified_base 9: mod_base = OTHER; note = 2'-Fluoro-adenosine
  modified_base 10: mod_base = gm
  modified_base 11: mod_base = cm
  modified_base 12: mod_base = um
  modified_base 13: mod_base = gm
  modified_base 14: mod_base = OTHER; note = 2'-Fluoro-uridine
  modified_base 15: mod_base = um
  modified_base 16: mod_base = OTHER; note = 2'-Fluoro-cytidine
  modified_base 17: mod_base = OTHER; note = 2'-O-methyl-adenosine
  modified_base 18: mod_base = OTHER; note = 2'-O-methyl-adenosine
  modified_base 19: mod_base = cm
  modified_base 20: mod_base = OTHER; note = 2'-Fluoro-adenosine
  modified_base 21: mod_base = um
  modified_base 21^22: mod_base = OTHER; note = Phosphorothioate bond
  modified_base 22: mod_base = um
  modified_base 22^23: mod_base = OTHER; note = Phosphorothioate bond
  modified_base 23: mod_base = cm
atttcaccagctgttcaacattc

SEQ ID NO: 776 - RNA, 23 nt, synthetic construct
  source 1..23: mol_type = other RNA
  modified_base 1: mod_base = um
  modified_base 1^2: mod_base = OTHER; note = Phosphorothioate bond
  modified_base 2: mod_base = OTHER; note = 2'-Fluoro-uridine
  modified_base 2^3: mod_base = OTHER; note = Phosphorothioate bond
  modified_base 3: mod_base = cm
  modified_base 4: mod_base = OTHER; note = 2'-O-methyl-adenosine
  modified_base 5: mod_base = OTHER; note = 2'-O-methyl-adenosine
  modified_base 6: mod_base = OTHER; note = 2'-Fluoro-cytidine
  modified_base 7: mod_base = OTHER; note = 2'-O-methyl-adenosine
  modified_base 8: mod_base = OTHER; note = 2'-Fluoro-uridine
  modified_base 9: mod_base = OTHER; note = 2'-Fluoro-uridine
  modified_base 10: mod_base = cm
  modified_base 11: mod_base = um
  modified_base 12: mod_base = gm
  modified_base 13: mod_base = OTHER; note = 2'-O-methyl-adenosine
  modified_base 14: mod_base = OTHER; note = 2'-Fluoro-uridine
  modified_base 15: mod_base = OTHER; note = 2'-O-methyl-adenosine
  modified_base 16: mod_base = OTHER; note = 2'-Fluoro-adenosine
  modified_base 17: mod_base = OTHER; note = 2'-O-methyl-adenosine
  modified_base 18: mod_base = um
  modified_base 19: mod_base = cm
  modified_base 20: mod_base = OTHER; note = 2'-Fluoro-uridine
  modified_base 21: mod_base = um
  modified_base 21^22: mod_base = OTHER; note = Phosphorothioate bond
  modified_base 22: mod_base = OTHER; note = 2'-O-methyl-adenosine
  modified_base 22^23: mod_base = OTHER; note = Phosphorothioate bond
  modified_base 23: mod_base = gm
ttcaacattctgataaatcttag

SEQ ID NO: 777 - RNA, 23 nt, synthetic construct
  source 1..23: mol_type = other RNA
  modified_base 1: mod_base = OTHER; note = 2'-O-methyl-adenosine
  modified_base 1^2: mod_base = OTHER; note = Phosphorothioate bond
  modified_base 2: mod_base = OTHER; note = 2'-Fluoro-uridine
  modified_base 2^3: mod_base = OTHER; note = Phosphorothioate bond
  modified_base 3: mod_base = cm
  modified_base 4: mod_base = cm
  modified_base 5: mod_base = OTHER; note = 2'-O-methyl-adenosine
  modified_base 6: mod_base = OTHER; note = 2'-Fluoro-uridine
  modified_base 7: mod_base = OTHER; note = 2'-O-methyl-adenosine
  modified_base 8: mod_base = OTHER; note = 2'-Fluoro-uridine
  modified_base 9: mod_base = OTHER; note = 2'-Fluoro-adenosine
  modified_base 10: mod_base = um
  modified_base 11: mod_base = OTHER; note = 2'-O-methyl-adenosine
  modified_base 12: mod_base = OTHER; note = 2'-O-methyl-adenosine
  modified_base 13: mod_base = OTHER; note = 2'-O-methyl-adenosine
  modified_base 14: mod_base = OTHER; note = 2'-Fluoro-cytidine
  modified_base 15: mod_base = cm
  modified_base 16: mod_base = OTHER; note = 2'-Fluoro-cytidine
  modified_base 17: mod_base = OTHER; note = 2'-O-methyl-adenosine
  modified_base 18: mod_base = um
  modified_base 19: mod_base = gm
  modified_base 20: mod_base = OTHER; note = 2'-Fluoro-guanosine
  modified_base 21: mod_base = OTHER; note = 2'-O-methyl-adenosine
  modified_base 21^22: mod_base = OTHER; note = Phosphorothioate bond
  modified_base 22: mod_base = cm
  modified_base 22^23: mod_base = OTHER; note = Phosphorothioate bond
  modified_base 23: mod_base = um
atccatatataaacccatggact

SEQ ID NO: 778 - RNA, 23 nt, synthetic construct
  source 1..23: mol_type = other RNA
  modified_base 1: mod_base = gm
  modified_base 1^2: mod_base = OTHER; note = Phosphorothioate bond
  modified_base 2: mod_base = OTHER; note = 2'-Fluoro-uridine
  modified_base 2^3: mod_base = OTHER; note = Phosphorothioate bond
  modified_base 3: mod_base = OTHER; note = 2'-O-methyl-adenosine
  modified_base 4: mod_base = OTHER; note = 2'-O-methyl-adenosine
  modified_base 5: mod_base = um
  modified_base 6: mod_base = OTHER; note = 2'-Fluoro-uridine
  modified_base 7: mod_base = um
  modified_base 8: mod_base = OTHER; note = 2'-Fluoro-guanosine
  modified_base 9: mod_base = OTHER; note = 2'-Fluoro-uridine
  modified_base 10: mod_base = cm
  modified_base 11: mod_base = cm
  modified_base 12: mod_base = um
  modified_base 13: mod_base = cm
  modified_base 14: mod_base = OTHER; note = 2'-Fluoro-adenosine
  modified_base 15: mod_base = um
  modified_base 16: mod_base = OTHER; note = 2'-Fluoro-uridine
  modified_base 17: mod_base = um
  modified_base 18: mod_base = cm
  modified_base 19: mod_base = um
  modified_base 20: mod_base = OTHER; note = 2'-Fluoro-uridine
  modified_base 21: mod_base = cm
  modified_base 21^22: mod_base = OTHER; note = Phosphorothioate bond
  modified_base 22: mod_base = OTHER; note = 2'-O-methyl-adenosine
  modified_base 22^23: mod_base = OTHER; note = Phosphorothioate bond
  modified_base 23: mod_base = OTHER; note = 2'-O-methyl-adenosine
gtaatttgtcctcatttcttcaa

SEQ ID NO: 779 - RNA, 23 nt, synthetic construct
  source 1..23: mol_type = other RNA
  modified_base 1: mod_base = um
  modified_base 1^2: mod_base = OTHER; note = Phosphorothioate bond
  modified_base 2: mod_base = OTHER; note = 2'-Fluoro-uridine
  modified_base 2^3: mod_base = OTHER; note = Phosphorothioate bond
  modified_base 3: mod_base = cm
  modified_base 4: mod_base = um
  modified_base 5: mod_base = um
  modified_base 6: mod_base = OTHER; note = 2'-Fluoro-uridine
  modified_base 7: mod_base = cm
  modified_base 8: mod_base = OTHER; note = 2'-Fluoro-guanosine
  modified_base 9: mod_base = OTHER; note = 2'-Fluoro-uridine
  modified_base 10: mod_base = cm
  modified_base 11: mod_base = gm
  modified_base 12: mod_base = OTHER; note = 2'-O-methyl-adenosine
  modified_base 13: mod_base = OTHER; note = 2'-O-methyl-adenosine
  modified_base 14: mod_base = OTHER; note = 2'-Fluoro-uridine
  modified_base 15: mod_base = cm
  modified_base 16: mod_base = OTHER; note = 2'-Fluoro-uridine
  modified_base 17: mod_base = um
  modified_base 18: mod_base = OTHER; note = 2'-O-methyl-adenosine
  modified_base 19: mod_base = um
  modified_base 20: mod_base = OTHER; note = 2'-Fluoro-cytidine
  modified_base 21: mod_base = OTHER; note = 2'-O-methyl-adenosine
  modified_base 21^22: mod_base = OTHER; note = Phosphorothioate bond
  modified_base 22: mod_base = OTHER; note = 2'-O-methyl-adenosine
  modified_base 22^23: mod_base = OTHER; note = Phosphorothioate bond
  modified_base 23: mod_base = um
ttctttcgtcgaatcttatcaat

SEQ ID NO: 780 - RNA, 23 nt, synthetic construct
  source 1..23: mol_type = other RNA
  modified_base 1: mod_base = OTHER; note = 2'-O-methyl-adenosine
  modified_base 1^2: mod_base = OTHER; note = Phosphorothioate bond
  modified_base 2: mod_base = OTHER; note = 2'-Fluoro-guanosine
  modified_base 2^3: mod_base = OTHER; note = Phosphorothioate bond
  modified_base 3: mod_base = gm
  modified_base 4: mod_base = gm
  modified_base 5: mod_base = OTHER; note = 2'-O-methyl-adenosine
  modified_base 6: mod_base = OTHER; note = 2'-Fluoro-adenosine
  modified_base 7: mod_base = um
  modified_base 8: mod_base = OTHER; note = 2'-Fluoro-adenosine
  modified_base 9: mod_base = OTHER; note = 2'-Fluoro-adenosine
  modified_base 10: mod_base = um
  modified_base 11: mod_base = OTHER; note = 2'-O-methyl-adenosine
  modified_base 12: mod_base = gm
  modified_base 13: mod_base = um
  modified_base 14: mod_base = OTHER; note = 2'-Fluoro-cytidine
  modified_base 15: mod_base = um
  modified_base 16: mod_base = OTHER; note = 2'-Fluoro-uridine
  modified_base 17: mod_base = um
  modified_base 18: mod_base = OTHER; note = 2'-O-methyl-adenosine
  modified_base 19: mod_base = um
  modified_base 20: mod_base = OTHER; note = 2'-Fluoro-cytidine
  modified_base 21: mod_base = OTHER; note = 2'-O-methyl-adenosine
  modified_base 21^22: mod_base = OTHER; note = Phosphorothioate bond
  modified_base 22: mod_base = um
  modified_base 22^23: mod_base = OTHER; note = Phosphorothioate bond
  modified_base 23: mod_base = cm
agggaataatagtctttatcatc

SEQ ID NO: 781 - RNA, 23 nt, synthetic construct
  source 1..23: mol_type = other RNA
  modified_base 1: mod_base = um
  modified_base 1^2: mod_base = OTHER; note = Phosphorothioate bond
  modified_base 2: mod_base = OTHER; note = 2'-Fluoro-adenosine
  modified_base 2^3: mod_base = OTHER; note = Phosphorothioate bond
  modified_base 3: mod_base = um
  modified_base 4: mod_base = OTHER; note = 2'-O-methyl-adenosine
  modified_base 5: mod_base = OTHER; note = 2'-O-methyl-adenosine
  modified_base 6: mod_base = OTHER; note = 2'-Fluoro-adenosine
  modified_base 7: mod_base = cm
  modified_base 8: mod_base = OTHER; note = 2'-Fluoro-cytidine
  modified_base 9: mod_base = OTHER; note = 2'-Fluoro-cytidine
  modified_base 10: mod_base = OTHER; note = 2'-O-methyl-adenosine
  modified_base 11: mod_base = um
  modified_base 12: mod_base = gm
  modified_base 13: mod_base = gm
  modified_base 14: mod_base = OTHER; note = 2'-Fluoro-adenosine
  modified_base 15: mod_base = cm
  modified_base 16: mod_base = OTHER; note = 2'-Fluoro-uridine
  modified_base 17: mod_base = cm
  modified_base 18: mod_base = OTHER; note = 2'-O-methyl-adenosine
  modified_base 19: mod_base = gm
  modified_base 20: mod_base = OTHER; note = 2'-Fluoro-cytidine
  modified_base 21: mod_base = um
  modified_base 21^22: mod_base = OTHER; note = Phosphorothioate bond
  modified_base 22: mod_base = OTHER; note = 2'-O-methyl-adenosine
  modified_base 22^23: mod_base = OTHER; note = Phosphorothioate bond
  modified_base 23: mod_base = cm
tataaacccatggactcagctac

SEQ ID NO: 782 - RNA, 23 nt, synthetic construct
  source 1..23: mol_type = other RNA
  modified_base 1: mod_base = um
  modified_base 1^2: mod_base = OTHER; note = Phosphorothioate bond
  modified_base 2: mod_base = OTHER; note = 2'-Fluoro-cytidine
  modified_base 2^3: mod_base = OTHER; note = Phosphorothioate bond
  modified_base 3: mod_base = um
  modified_base 4: mod_base = OTHER; note = 2'-O-methyl-adenosine
  modified_base 5: mod_base = cm
  modified_base 6: mod_base = OTHER; note = 2'-Fluoro-uridine
  modified_base 7: mod_base = um
  modified_base 8: mod_base = OTHER; note = 2'-Fluoro-cytidine
  modified_base 9: mod_base = OTHER; note = 2'-Fluoro-cytidine
  modified_base 10: mod_base = um
  modified_base 11: mod_base = cm
  modified_base 12: mod_base = OTHER; note = 2'-O-methyl-adenosine
  modified_base 13: mod_base = gm
  modified_base 14: mod_base = OTHER; note = 2'-Fluoro-uridine
  modified_base 15: mod_base = cm
  modified_base 16: mod_base = OTHER; note = 2'-Fluoro-uridine
  modified_base 17: mod_base = um
  modified_base 18: mod_base = OTHER; note = 2'-O-methyl-adenosine
  modified_base 19: mod_base = gm
  modified_base 20: mod_base = OTHER; note = 2'-Fluoro-guanosine
  modified_base 21: mod_base = OTHER; note = 2'-O-methyl-adenosine
  modified_base 21^22: mod_base = OTHER; note = Phosphorothioate bond
  modified_base 22: mod_base = OTHER; note = 2'-O-methyl-adenosine
  modified_base 22^23: mod_base = OTHER; note = Phosphorothioate bond
  modified_base 23: mod_base = OTHER; note = 2'-O-methyl-adenosine
tctacttcctcagtcttaggaaa

SEQ ID NO: 783 - RNA, 23 nt, synthetic construct
  source 1..23: mol_type = other RNA
  modified_base 1: mod_base = OTHER; note = 2'-O-methyl-adenosine
  modified_base 1^2: mod_base = OTHER; note = Phosphorothioate bond
  modified_base 2: mod_base = OTHER; note = 2'-Fluoro-adenosine
  modified_base 2^3: mod_base = OTHER; note = Phosphorothioate bond
  modified_base 3: mod_base = OTHER; note = 2'-O-methyl-adenosine
  modified_base 4: mod_base = gm
  modified_base 5: mod_base = gm
  modified_base 6: mod_base = OTHER; note = 2'-Fluoro-adenosine
  modified_base 7: mod_base = OTHER; note = 2'-O-methyl-adenosine
  modified_base 8: mod_base = OTHER; note = 2'-Fluoro-cytidine
  modified_base 9: mod_base = OTHER; note = 2'-Fluoro-uridine
  modified_base 10: mod_base = cm
  modified_base 11: mod_base = OTHER; note = 2'-O-methyl-adenosine
  modified_base 12: mod_base = gm
  modified_base 13: mod_base = gm
  modified_base 14: mod_base = OTHER; note = 2'-Fluoro-uridine
  modified_base 15: mod_base = gm
  modified_base 16: mod_base = OTHER; note = 2'-Fluoro-uridine
  modified_base 17: mod_base = um
  modified_base 18: mod_base = gm
  modified_base 19: mod_base = gm
  modified_base 20: mod_base = OTHER; note = 2'-Fluoro-adenosine
  modified_base 21: mod_base = OTHER; note = 2'-O-methyl-adenosine
  modified_base 21^22: mod_base = OTHER; note = Phosphorothioate bond
  modified_base 22: mod_base = OTHER; note = 2'-O-methyl-adenosine
  modified_base 22^23: mod_base = OTHER; note = Phosphorothioate bond
  modified_base 23: mod_base = gm
aaaggaactcaggtgttggaaag

SEQ ID NO: 784 - RNA, 23 nt, synthetic construct
  source 1..23: mol_type = other RNA
  modified_base 1: mod_base = um
  modified_base 1^2: mod_base = OTHER; note = Phosphorothioate bond
  modified_base 2: mod_base = OTHER; note = 2'-Fluoro-uridine
  modified_base 2^3: mod_base = OTHER; note = Phosphorothioate bond
  modified_base 3: mod_base = um
  modified_base 4: mod_base = cm
  modified_base 5: mod_base = gm
  modified_base 6: mod_base = OTHER; note = 2'-Fluoro-uridine
  modified_base 7: mod_base = cm
  modified_base 8: mod_base = OTHER; note = 2'-Fluoro-guanosine
  modified_base 9: mod_base = OTHER; note = 2'-Fluoro-adenosine
  modified_base 10: mod_base = OTHER; note = 2'-O-methyl-adenosine
  modified_base 11: mod_base = um
  modified_base 12: mod_base = cm
  modified_base 13: mod_base = um
  modified_base 14: mod_base = OTHER; note = 2'-Fluoro-uridine
  modified_base 15: mod_base = OTHER; note = 2'-O-methyl-adenosine
  modified_base 16: mod_base = OTHER; note = 2'-Fluoro-uridine
  modified_base 17: mod_base = cm
  modified_base 18: mod_base = OTHER; note = 2'-O-methyl-adenosine
  modified_base 19: mod_base = OTHER; note = 2'-O-methyl-adenosine
  modified_base 20: mod_base = OTHER; note = 2'-Fluoro-uridine
  modified_base 21: mod_base = gm
  modified_base 21^22: mod_base = OTHER; note = Phosphorothioate bond
  modified_base 22: mod_base = OTHER; note = 2'-O-methyl-adenosine
  modified_base 22^23: mod_base = OTHER; note = Phosphorothioate bond
  modified_base 23: mod_base = um
tttcgtcgaatcttatcaatgat

SEQ ID NO: 785 - RNA, 23 nt, synthetic construct
  source 1..23: mol_type = other RNA
  modified_base 1: mod_base = um
  modified_base 1^2: mod_base = OTHER; note = Phosphorothioate bond
  modified_base 2: mod_base = OTHER; note = 2'-Fluoro-guanosine
  modified_base 2^3: mod_base = OTHER; note = Phosphorothioate bond
  modified_base 3: mod_base = gm
  modified_base 4: mod_base = OTHER; note = 2'-O-methyl-adenosine
  modified_base 5: mod_base = OTHER; note = 2'-O-methyl-adenosine
  modified_base 6: mod_base = OTHER; note = 2'-Fluoro-adenosine
  modified_base 7: mod_base = um
  modified_base 8: mod_base = OTHER; note = 2'-Fluoro-uridine
  modified_base 9: mod_base = OTHER; note = 2'-Fluoro-guanosine
  modified_base 10: mod_base = OTHER; note = 2'-O-methyl-adenosine
  modified_base 11: mod_base = gm
  modified_base 12: mod_base = gm
  modified_base 13: mod_base = OTHER; note = 2'-O-methyl-adenosine
  modified_base 14: mod_base = OTHER; note = 2'-Fluoro-uridine
  modified_base 15: mod_base = um
  modified_base 16: mod_base = OTHER; note = 2'-Fluoro-uridine
  modified_base 17: mod_base = cm
  modified_base 18: mod_base = OTHER; note = 2'-O-methyl-adenosine
  modified_base 19: mod_base = um
  modified_base 20: mod_base = OTHER; note = 2'-Fluoro-guanosine
  modified_base 21: mod_base = cm
  modified_base 21^22: mod_base = OTHER; note = Phosphorothioate bond
  modified_base 22: mod_base = um
  modified_base 22^23: mod_base = OTHER; note = Phosphorothioate bond
  modified_base 23: mod_base = OTHER; note = 2'-O-methyl-adenosine
tggaaattgaggatttcatgcta

SEQ ID NO: 786 - RNA, 23 nt, synthetic construct
  source 1..23: mol_type = other RNA
  modified_base 1: mod_base = OTHER; note = 2'-O-methyl-adenosine
  modified_base 1^2: mod_base = OTHER; note = Phosphorothioate bond
  modified_base 2: mod_base = OTHER; note = 2'-Fluoro-adenosine
  modified_base 2^3: mod_base = OTHER; note = Phosphorothioate bond
  modified_base 3: mod_base = gm
  modified_base 4: mod_base = um
  modified_base 5: mod_base = OTHER; note = 2'-O-methyl-adenosine
  modified_base 6: mod_base = OTHER; note = 2'-Fluoro-guanosine
  modified_base 7: mod_base = OTHER; note = 2'-O-methyl-adenosine
  modified_base 8: mod_base = OTHER; note = 2'-Fluoro-guanosine
  modified_base 9: mod_base = OTHER; note = 2'-Fluoro-cytidine
  modified_base 10: mod_base = um
  modified_base 11: mod_base = um
  modified_base 12: mod_base = gm
  modified_base 13: mod_base = OTHER; note = 2'-O-methyl-adenosine
  modified_base 14: mod_base = OTHER; note = 2'-Fluoro-uridine
  modified_base 15: mod_base = OTHER; note = 2'-O-methyl-adenosine
  modified_base 16: mod_base = OTHER; note = 2'-Fluoro-cytidine
  modified_base 17: mod_base = OTHER; note = 2'-O-methyl-adenosine
  modified_base 18: mod_base = um
  modified_base 19: mod_base = um
  modified_base 20: mod_base = OTHER; note = 2'-Fluoro-uridine
  modified_base 21: mod_base = um
  modified_base 21^22: mod_base = OTHER; note = Phosphorothioate bond
  modified_base 22: mod_base = cm
  modified_base 22^23: mod_base = OTHER; note = Phosphorothioate bond
  modified_base 23: mod_base = um
aagtagagcttgatacattttct

SEQ ID NO: 787 - RNA, 23 nt, synthetic construct
  source 1..23: mol_type = other RNA
  modified_base 1: mod_base = um
  modified_base 1^2: mod_base = OTHER; note = Phosphorothioate bond
  modified_base 2: mod_base = OTHER; note = 2'-Fluoro-uridine
  modified_base 2^3: mod_base = OTHER; note = Phosphorothioate bond
  modified_base 3: mod_base = gm
  modified_base 4: mod_base = gm
  modified_base 5: mod_base = OTHER; note = 2'-O-methyl-adenosine
  modified_base 6: mod_base = OTHER; note = 2'-Fluoro-adenosine
  modified_base 7: mod_base = um
  modified_base 8: mod_base = OTHER; note = 2'-Fluoro-uridine
  modified_base 9: mod_base = OTHER; note = 2'-Fluoro-guanosine
  modified_base 10: mod_base = um
  modified_base 11: mod_base = gm
  modified_base 12: mod_base = cm
  modified_base 13: mod_base = um
  modified_base 14: mod_base = OTHER; note = 2'-Fluoro-uridine
  modified_base 15: mod_base = OTHER; note = 2'-O-methyl-adenosine
  modified_base 16: mod_base = OTHER; note = 2'-Fluoro-guanosine
  modified_base 17: mod_base = um
  modified_base 18: mod_base = OTHER; note = 2'-O-methyl-adenosine
  modified_base 19: mod_base = gm
  modified_base 20: mod_base = OTHER; note = 2'-Fluoro-cytidine
  modified_base 21: mod_base = OTHER; note = 2'-O-methyl-adenosine
  modified_base 21^22: mod_base = OTHER; note = Phosphorothioate bond
  modified_base 22: mod_base = gm
  modified_base 22^23: mod_base = OTHER; note = Phosphorothioate bond
  modified_base 23: mod_base = cm
ttggaattgtgcttagtagcagc

SEQ ID NO: 788 - RNA, 23 nt, synthetic construct
  source 1..23: mol_type = other RNA
  modified_base 1: mod_base = um
  modified_base 1^2: mod_base = OTHER; note = Phosphorothioate bond
  modified_base 2: mod_base = OTHER; note = 2'-Fluoro-adenosine
  modified_base 2^3: mod_base = OTHER; note = Phosphorothioate bond
  modified_base 3: mod_base = cm
  modified_base 4: mod_base = OTHER; note = 2'-O-methyl-adenosine
  modified_base 5: mod_base = gm
  modified_base 6: mod_base = OTHER; note = 2'-Fluoro-adenosine
  modified_base 7: mod_base = um
  modified_base 8: mod_base = OTHER; note = 2'-Fluoro-adenosine
  modified_base 9: mod_base = OTHER; note = 2'-Fluoro-guanosine
  modified_base 10: mod_base = OTHER; note = 2'-O-methyl-adenosine
  modified_base 11: mod_base = um
  modified_base 12: mod_base = cm
  modified_base 13: mod_base = cm
  modified_base 14: mod_base = OTHER; note = 2'-Fluoro-cytidine
  modified_base 15: mod_base = OTHER; note = 2'-O-methyl-adenosine
  modified_base 16: mod_base = OTHER; note = 2'-Fluoro-cytidine
  modified_base 17: mod_base = OTHER; note = 2'-O-methyl-adenosine
  modified_base 18: mod_base = gm
  modified_base 19: mod_base = um
  modified_base 20: mod_base = OTHER; note = 2'-Fluoro-adenosine
  modified_base 21: mod_base = cm
  modified_base 21^22: mod_base = OTHER; note = Phosphorothioate bond
  modified_base 22: mod_base = um
  modified_base 22^23: mod_base = OTHER; note = Phosphorothioate bond
  modified_base 23: mod_base = gm
tacagatagatcccacagtactg

SEQ ID NO: 789 - RNA, 23 nt, synthetic construct
  source 1..23: mol_type = other RNA
  modified_base 1: mod_base = um
  modified_base 1^2: mod_base = OTHER; note = Phosphorothioate bond
  modified_base 2: mod_base = OTHER; note = 2'-Fluoro-uridine
  modified_base 2^3: mod_base = OTHER; note = Phosphorothioate bond
  modified_base 3: mod_base = um
  modified_base 4: mod_base = OTHER; note = 2'-O-methyl-adenosine
  modified_base 5: mod_base = um
  modified_base 6: mod_base = OTHER; note = 2'-Fluoro-uridine
  modified_base 7: mod_base = um
  modified_base 8: mod_base = OTHER; note = 2'-Fluoro-uridine
  modified_base 9: mod_base = OTHER; note = 2'-Fluoro-guanosine
  modified_base 10: mod_base = cm
  modified_base 11: mod_base = um
  modified_base 12: mod_base = OTHER; note = 2'-O-methyl-adenosine
  modified_base 13: mod_base = um
  modified_base 14: mod_base = OTHER; note = 2'-Fluoro-uridine
  modified_base 15: mod_base = um
  modified_base 16: mod_base = OTHER; note = 2'-Fluoro-cytidine
  modified_base 17: mod_base = cm
  modified_base 18: mod_base = um
  modified_base 19: mod_base = cm
  modified_base 20: mod_base = OTHER; note = 2'-Fluoro-cytidine
  modified_base 21: mod_base = um
  modified_base 21^22: mod_base = OTHER; note = Phosphorothioate bond
  modified_base 22: mod_base = OTHER; note = 2'-O-methyl-adenosine
  modified_base 22^23: mod_base = OTHER; note = Phosphorothioate bond
  modified_base 23: mod_base = gm
tttattttgctatttcctcctag

SEQ ID NO: 790 - RNA, 23 nt, synthetic construct
  source 1..23: mol_type = other RNA
  modified_base 1: mod_base = um
  modified_base 1^2: mod_base = OTHER; note = Phosphorothioate bond
  modified_base 2: mod_base = OTHER; note = 2'-Fluoro-adenosine
  modified_base 2^3: mod_base = OTHER; note = Phosphorothioate bond
  modified_base 3: mod_base = um
  modified_base 4: mod_base = cm
  modified_base 5: mod_base = OTHER; note = 2'-O-methyl-adenosine
  modified_base 6: mod_base = OTHER; note = 2'-Fluoro-adenosine
  modified_base 7: mod_base = um
  modified_base 8: mod_base = OTHER; note = 2'-Fluoro-guanosine
  modified_base 9: mod_base = OTHER; note = 2'-Fluoro-adenosine
  modified_base 10: mod_base = um
  modified_base 11: mod_base = gm
  modified_base 12: mod_base = cm
  modified_base 13: mod_base = OTHER; note = 2'-O-methyl-adenosine
  modified_base 14: mod_base = OTHER; note = 2'-Fluoro-adenosine
  modified_base 15: mod_base = um
  modified_base 16: mod_base = OTHER; note = 2'-Fluoro-cytidine
  modified_base 17: mod_base = OTHER; note = 2'-O-methyl-adenosine
  modified_base 18: mod_base = um
  modified_base 19: mod_base = um
  modified_base 20: mod_base = OTHER; note = 2'-Fluoro-uridine
  modified_base 21: mod_base = cm
  modified_base 21^22: mod_base = OTHER; note = Phosphorothioate bond
  modified_base 22: mod_base = um
  modified_base 22^23: mod_base = OTHER; note = Phosphorothioate bond
  modified_base 23: mod_base = um
tatcaatgatgcaatcatttctt

SEQ ID NO: 791 - RNA, 23 nt, synthetic construct
  source 1..23: mol_type = other RNA
  modified_base 1: mod_base = OTHER; note = 2'-O-methyl-adenosine
  modified_base 1^2: mod_base = OTHER; note = Phosphorothioate bond
  modified_base 2: mod_base = OTHER; note = 2'-Fluoro-uridine
  modified_base 2^3: mod_base = OTHER; note = Phosphorothioate bond
  modified_base 3: mod_base = um
  modified_base 4: mod_base = um
  modified_base 5: mod_base = um
  modified_base 6: mod_base = OTHER; note = 2'-Fluoro-adenosine
  modified_base 7: mod_base = cm
  modified_base 8: mod_base = OTHER; note = 2'-Fluoro-adenosine
  modified_base 9: mod_base = OTHER; note = 2'-Fluoro-cytidine
  modified_base 10: mod_base = um
  modified_base 11: mod_base = gm
  modified_base 12: mod_base = cm
  modified_base 13: mod_base = OTHER; note = 2'-O-methyl-adenosine
  modified_base 14: mod_base = OTHER; note = 2'-Fluoro-guanosine
  modified_base 15: mod_base = um
  modified_base 16: mod_base = OTHER; note = 2'-Fluoro-guanosine
  modified_base 17: mod_base = OTHER; note = 2'-O-methyl-adenosine
  modified_base 18: mod_base = cm
  modified_base 19: mod_base = um
  modified_base 20: mod_base = OTHER; note = 2'-Fluoro-uridine
  modified_base 21: mod_base = gm
  modified_base 21^22: mod_base = OTHER; note = Phosphorothioate bond
  modified_base 22: mod_base = gm
  modified_base 22^23: mod_base = OTHER; note = Phosphorothioate bond
  modified_base 23: mod_base = OTHER; note = 2'-O-methyl-adenosine
attttacactgcagtgacttgga

SEQ ID NO: 792 - RNA, 23 nt, synthetic construct
  source 1..23: mol_type = other RNA
  modified_base 1: mod_base = um
  modified_base 1^2: mod_base = OTHER; note = Phosphorothioate bond
  modified_base 2: mod_base = OTHER; note = 2'-Fluoro-cytidine
  modified_base 2^3: mod_base = OTHER; note = Phosphorothioate bond
  modified_base 3: mod_base = um
  modified_base 4: mod_base = gm
  modified_base 5: mod_base = OTHER; note = 2'-O-methyl-adenosine
  modified_base 6: mod_base = OTHER; note = 2'-Fluoro-uridine
  modified_base 7: mod_base = OTHER; note = 2'-O-methyl-adenosine
  modified_base 8: mod_base = OTHER; note = 2'-Fluoro-adenosine
  modified_base 9: mod_base = OTHER; note = 2'-Fluoro-adenosine
  modified_base 10: mod_base = um
  modified_base 11: mod_base = cm
  modified_base 12: mod_base = um
  modified_base 13: mod_base = um
  modified_base 14: mod_base = OTHER; note = 2'-Fluoro-adenosine
  modified_base 15: mod_base = gm
  modified_base 16: mod_base = OTHER; note = 2'-Fluoro-cytidine
  modified_base 17: mod_base = um
  modified_base 18: mod_base = gm
  modified_base 19: mod_base = gm
  modified_base 20: mod_base = OTHER; note = 2'-Fluoro-adenosine
  modified_base 21: mod_base = cm
  modified_base 21^22: mod_base = OTHER; note = Phosphorothioate bond
  modified_base 22: mod_base = um
  modified_base 22^23: mod_base = OTHER; note = Phosphorothioate bond
  modified_base 23: mod_base = cm
tctgataaatcttagctggactc

SEQ ID NO: 793 - RNA, 23 nt, synthetic construct
  source 1..23: mol_type = other RNA
  modified_base 1: mod_base = um
  modified_base 1^2: mod_base = OTHER; note = Phosphorothioate bond
  modified_base 2: mod_base = OTHER; note = 2'-Fluoro-cytidine
  modified_base 2^3: mod_base = OTHER; note = Phosphorothioate bond
  modified_base 3: mod_base = gm
  modified_base 4: mod_base = OTHER; note = 2'-O-methyl-adenosine
  modified_base 5: mod_base = OTHER; note = 2'-O-methyl-adenosine
  modified_base 6: mod_base = OTHER; note = 2'-Fluoro-uridine
  modified_base 7: mod_base = cm
  modified_base 8: mod_base = OTHER; note = 2'-Fluoro-uridine
  modified_base 9: mod_base = OTHER; note = 2'-Fluoro-uridine
  modified_base 10: mod_base = OTHER; note = 2'-O-methyl-adenosine
  modified_base 11: mod_base = um
  modified_base 12: mod_base = cm
  modified_base 13: mod_base = OTHER; note = 2'-O-methyl-adenosine
  modified_base 14: mod_base = OTHER; note = 2'-Fluoro-adenosine
  modified_base 15: mod_base = um
  modified_base 16: mod_base = OTHER; note = 2'-Fluoro-guanosine
  modified_base 17: mod_base = OTHER; note = 2'-O-methyl-adenosine
  modified_base 18: mod_base = um
  modified_base 19: mod_base = gm
  modified_base 20: mod_base = OTHER; note = 2'-Fluoro-cytidine
  modified_base 21: mod_base = OTHER; note = 2'-O-methyl-adenosine
  modified_base 21^22: mod_base = OTHER; note = Phosphorothioate bond
  modified_base 22: mod_base = OTHER; note = 2'-O-methyl-adenosine
  modified_base 22^23: mod_base = OTHER; note = Phosphorothioate bond
  modified_base 23: mod_base = um
tcgaatcttatcaatgatgcaat

SEQ ID NO: 794 - RNA, 23 nt, synthetic construct
  source 1..23: mol_type = other RNA
  modified_base 1: mod_base = gm
  modified_base 1^2: mod_base = OTHER; note = Phosphorothioate bond
  modified_base 2: mod_base = OTHER; note = 2'-Fluoro-adenosine
  modified_base 2^3: mod_base = OTHER; note = Phosphorothioate bond
  modified_base 3: mod_base = gm
  modified_base 4: mod_base = gm
  modified_base 5: mod_base = OTHER; note = 2'-O-methyl-adenosine
  modified_base 6: mod_base = OTHER; note = 2'-Fluoro-uridine
  modified_base 7: mod_base = um
  modified_base 8: mod_base = OTHER; note = 2'-Fluoro-uridine
  modified_base 9: mod_base = OTHER; note = 2'-Fluoro-cytidine
  modified_base 10: mod_base = OTHER; note = 2'-O-methyl-adenosine
  modified_base 11: mod_base = um
  modified_base 12: mod_base = gm
  modified_base 13: mod_base = cm
  modified_base 14: mod_base = OTHER; note = 2'-Fluoro-uridine
  modified_base 15: mod_base = OTHER; note = 2'-O-methyl-adenosine
  modified_base 16: mod_base = OTHER; note = 2'-Fluoro-cytidine
  modified_base 17: mod_base = um
  modified_base 18: mod_base = um
  modified_base 19: mod_base = OTHER; note = 2'-O-methyl-adenosine
  modified_base 20: mod_base = OTHER; note = 2'-Fluoro-adenosine
  modified_base 21: mod_base = cm
  modified_base 21^22: mod_base = OTHER; note = Phosphorothioate bond
  modified_base 22: mod_base = gm
  modified_base 22^23: mod_base = OTHER; note = Phosphorothioate bond
  modified_base 23: mod_base = gm
gaggatttcatgctacttaacgg

SEQ ID NO: 795 - RNA, 23 nt, synthetic construct
  source 1..23: mol_type = other RNA
  modified_base 1: mod_base = gm
  modified_base 1^2: mod_base = OTHER; note = Phosphorothioate bond
  modified_base 2: mod_base = OTHER; note = 2'-Fluoro-adenosine
  modified_base 2^3: mod_base = OTHER; note = Phosphorothioate bond
  modified_base 3: mod_base = OTHER; note = 2'-O-methyl-adenosine
  modified_base 4: mod_base = OTHER; note = 2'-O-methyl-adenosine
  modified_base 5: mod_base = gm
  modified_base 6: mod_base = OTHER; note = 2'-Fluoro-cytidine
  modified_base 7: mod_base = gm
  modified_base 8: mod_base = OTHER; note = 2'-Fluoro-uridine
  modified_base 9: mod_base = OTHER; note = 2'-Fluoro-guanosine
  modified_base 10: mod_base = gm
  modified_base 11: mod_base = OTHER; note = 2'-O-methyl-adenosine
  modified_base 12: mod_base = um
  modified_base 13: mod_base = cm
  modified_base 14: mod_base = OTHER; note = 2'-Fluoro-uridine
  modified_base 15: mod_base = gm
  modified_base 16: mod_base = OTHER; note = 2'-Fluoro-uridine
  modified_base 17: mod_base = um
  modified_base 18: mod_base = OTHER; note = 2'-O-methyl-adenosine
  modified_base 19: mod_base = um
  modified_base 20: mod_base = OTHER; note = 2'-Fluoro-uridine
  modified_base 21: mod_base = OTHER; note = 2'-O-methyl-adenosine
  modified_base 21^22: mod_base = OTHER; note = Phosphorothioate bond
  modified_base 22: mod_base = gm
  modified_base 22^23: mod_base = OTHER; note = Phosphorothioate bond
  modified_base 23: mod_base = um
gaaagcgtggatctgttattagt

SEQ ID NO: 796 - RNA, 23 nt, synthetic construct
  source 1..23: mol_type = other RNA
  modified_base 1: mod_base = OTHER; note = 2'-O-methyl-adenosine
  modified_base 1^2: mod_base = OTHER; note = Phosphorothioate bond
  modified_base 2: mod_base = OTHER; note = 2'-Fluoro-guanosine
  modified_base 2^3: mod_base = OTHER; note = Phosphorothioate bond
  modified_base 3: mod_base = um
  modified_base 4: mod_base = OTHER; note = 2'-O-methyl-adenosine
  modified_base 5: mod_base = gm
  modified_base 6: mod_base = OTHER; note = 2'-Fluoro-adenosine
  modified_base 7: mod_base = gm
  modified_base 8: mod_base = OTHER; note = 2'-Fluoro-cytidine
  modified_base 9: mod_base = OTHER; note = 2'-Fluoro-uridine
  modified_base 10: mod_base = um
  modified_base 11: mod_base = gm
  modified_base 12: mod_base = OTHER; note = 2'-O-methyl-adenosine
  modified_base 13: mod_base = um
  modified_base 14: mod_base = OTHER; note = 2'-Fluoro-adenosine
  modified_base 15: mod_base = cm
  modified_base 16: mod_base = OTHER; note = 2'-Fluoro-adenosine
  modified_base 17: mod_base = um
  modified_base 18: mod_base = um
  modified_base 19: mod_base = um
  modified_base 20: mod_base = OTHER; note = 2'-Fluoro-uridine
  modified_base 21: mod_base = cm
  modified_base 21^22: mod_base = OTHER; note = Phosphorothioate bond
  modified_base 22: mod_base = um
  modified_base 22^23: mod_base = OTHER; note = Phosphorothioate bond
  modified_base 23: mod_base = gm
agtagagcttgatacattttctg

SEQ ID NO: 797 - RNA, 23 nt, synthetic construct
  source 1..23: mol_type = other RNA
  modified_base 1: mod_base = OTHER; note = 2'-O-methyl-adenosine
  modified_base 1^2: mod_base = OTHER; note = Phosphorothioate bond
  modified_base 2: mod_base = OTHER; note = 2'-Fluoro-adenosine
  modified_base 2^3: mod_base = OTHER; note = Phosphorothioate bond
  modified_base 3: mod_base = um
  modified_base 4: mod_base = cm
  modified_base 5: mod_base = cm
  modified_base 6: mod_base = OTHER; note = 2'-Fluoro-adenosine
  modified_base 7: mod_base = um
  modified_base 8: mod_base = OTHER; note = 2'-Fluoro-adenosine
  modified_base 9: mod_base = OTHER; note = 2'-Fluoro-uridine
  modified_base 10: mod_base = OTHER; note = 2'-O-methyl-adenosine
  modified_base 11: mod_base = um
  modified_base 12: mod_base = OTHER; note = 2'-O-methyl-adenosine
  modified_base 13: mod_base = OTHER; note = 2'-O-methyl-adenosine
  modified_base 14: mod_base = OTHER; note = 2'-Fluoro-adenosine
  modified_base 15: mod_base = cm
  modified_base 16: mod_base = OTHER; note = 2'-Fluoro-cytidine
  modified_base 17: mod_base = cm
  modified_base 18: mod_base = OTHER; note = 2'-O-methyl-adenosine
  modified_base 19: mod_base = um
  modified_base 20: mod_base = OTHER; note = 2'-Fluoro-guanosine
  modified_base 21: mod_base = gm
  modified_base 21^22: mod_base = OTHER; note = Phosphorothioate bond
  modified_base 22: mod_base = OTHER; note = 2'-O-methyl-adenosine
  modified_base 22^23: mod_base = OTHER; note = Phosphorothioate bond
  modified_base 23: mod_base = cm
aatccatatataaacccatggac

SEQ ID NO: 798 - RNA, 23 nt, synthetic construct
  source 1..23: mol_type = other RNA
  modified_base 1: mod_base = OTHER; note = 2'-O-methyl-adenosine
  modified_base 1^2: mod_base = OTHER; note = Phosphorothioate bond
  modified_base 2: mod_base = OTHER; note = 2'-Fluoro-adenosine
  modified_base 2^3: mod_base = OTHER; note = Phosphorothioate bond
  modified_base 3: mod_base = OTHER; note = 2'-O-methyl-adenosine
  modified_base 4: mod_base = gm
  modified_base 5: mod_base = um
  modified_base 6: mod_base = OTHER; note = 2'-Fluoro-adenosine
  modified_base 7: mod_base = gm
  modified_base 8: mod_base = OTHER; note = 2'-Fluoro-adenosine
  modified_base 9: mod_base = OTHER; note = 2'-Fluoro-guanosine
  modified_base 10: mod_base = cm
  modified_base 11: mod_base = um
  modified_base 12: mod_base = um
  modified_base 13: mod_base = gm
  modified_base 14: mod_base = OTHER; note = 2'-Fluoro-adenosine
  modified_base 15: mod_base = um
  modified_base 16: mod_base = OTHER; note = 2'-Fluoro-adenosine
  modified_base 17: mod_base = cm
  modified_base 18: mod_base = OTHER; note = 2'-O-methyl-adenosine
  modified_base 19: mod_base = um
  modified_base 20: mod_base = OTHER; note = 2'-Fluoro-uridine
  modified_base 21: mod_base = um
  modified_base 21^22: mod_base = OTHER; note = Phosphorothioate bond
  modified_base 22: mod_base = um
  modified_base 22^23: mod_base = OTHER; note = Phosphorothioate bond
  modified_base 23: mod_base = cm
aaagtagagcttgatacattttc

SEQ ID NO: 799 - RNA, 23 nt, synthetic construct
  source 1..23: mol_type = other RNA
  modified_base 1: mod_base = gm
  modified_base 1^2: mod_base = OTHER; note = Phosphorothioate bond
  modified_base 2: mod_base = OTHER; note = 2'-Fluoro-adenosine
  modified_base 2^3: mod_base = OTHER; note = Phosphorothioate bond
  modified_base 3: mod_base = um
  modified_base 4: mod_base = um
  modified_base 5: mod_base = um
  modified_base 6: mod_base = OTHER; note = 2'-Fluoro-cytidine
  modified_base 7: mod_base = OTHER; note = 2'-O-methyl-adenosine
  modified_base 8: mod_base = OTHER; note = 2'-Fluoro-uridine
  modified_base 9: mod_base = OTHER; note = 2'-Fluoro-guanosine
  modified_base 10: mod_base = cm
  modified_base 11: mod_base = um
  modified_base 12: mod_base = OTHER; note = 2'-O-methyl-adenosine
  modified_base 13: mod_base = cm
  modified_base 14: mod_base = OTHER; note = 2'-Fluoro-uridine
  modified_base 15: mod_base = um
  modified_base 16: mod_base = OTHER; note = 2'-Fluoro-adenosine
  modified_base 17: mod_base = OTHER; note = 2'-O-methyl-adenosine
  modified_base 18: mod_base = cm
  modified_base 19: mod_base = gm
  modified_base 20: mod_base = OTHER; note = 2'-Fluoro-guanosine
  modified_base 21: mod_base = OTHER; note = 2'-O-methyl-adenosine
  modified_base 21^22: mod_base = OTHER; note = Phosphorothioate bond
  modified_base 22: mod_base = cm
  modified_base 22^23: mod_base = OTHER; note = Phosphorothioate bond
  modified_base 23: mod_base = um
gatttcatgctacttaacggact

SEQ ID NO: 800 - RNA, 23 nt, synthetic construct
  source 1..23: mol_type = other RNA
  modified_base 1: mod_base = OTHER; note = 2'-O-methyl-adenosine
  modified_base 1^2: mod_base = OTHER; note = Phosphorothioate bond
  modified_base 2: mod_base = OTHER; note = 2'-Fluoro-uridine
  modified_base 2^3: mod_base = OTHER; note = Phosphorothioate bond
  modified_base 3: mod_base = OTHER; note = 2'-O-methyl-adenosine
  modified_base 4: mod_base = gm
  modified_base 5: mod_base = gm
  modified_base 6: mod_base = OTHER; note = 2'-Fluoro-guanosine
  modified_base 7: mod_base = OTHER; note = 2'-O-methyl-adenosine
  modified_base 8: mod_base = OTHER; note = 2'-Fluoro-adenosine
  modified_base 9: mod_base = OTHER; note = 2'-Fluoro-uridine
  modified_base 10: mod_base = OTHER; note = 2'-O-methyl-adenosine
  modified_base 11: mod_base = OTHER; note = 2'-O-methyl-adenosine
  modified_base 12: mod_base = um
  modified_base 13: mod_base = OTHER; note = 2'-O-methyl-adenosine
  modified_base 14: mod_base = OTHER; note = 2'-Fluoro-guanosine
  modified_base 15: mod_base = um
  modified_base 16: mod_base = OTHER; note = 2'-Fluoro-cytidine
  modified_base 17: mod_base = um
  modified_base 18: mod_base = um
  modified_base 19: mod_base = um
  modified_base 20: mod_base = OTHER; note = 2'-Fluoro-adenosine
  modified_base 21: mod_base = um
  modified_base 21^22: mod_base = OTHER; note = Phosphorothioate bond
  modified_base 22: mod_base = cm
  modified_base 22^23: mod_base = OTHER; note = Phosphorothioate bond
  modified_base 23: mod_base = OTHER; note = 2'-O-methyl-adenosine
atagggaataatagtctttatca

SEQ ID NO: 801 - RNA, 23 nt, synthetic construct
  source 1..23: mol_type = other RNA
  modified_base 1: mod_base = cm
  modified_base 1^2: mod_base = OTHER; note = Phosphorothioate bond
  modified_base 2: mod_base = OTHER; note = 2'-Fluoro-uridine
  modified_base 2^3: mod_base = OTHER; note = Phosphorothioate bond
  modified_base 3: mod_base = um
  modified_base 4: mod_base = OTHER; note = 2'-O-methyl-adenosine
  modified_base 5: mod_base = gm
  modified_base 6: mod_base = OTHER; note = 2'-Fluoro-uridine
  modified_base 7: mod_base = OTHER; note = 2'-O-methyl-adenosine
  modified_base 8: mod_base = OTHER; note = 2'-Fluoro-guanosine
  modified_base 9: mod_base = OTHER; note = 2'-Fluoro-cytidine
  modified_base 10: mod_base = OTHER; note = 2'-O-methyl-adenosine
  modified_base 11: mod_base = gm
  modified_base 12: mod_base = cm
  modified_base 13: mod_base = OTHER; note = 2'-O-methyl-adenosine
  modified_base 14: mod_base = OTHER; note = 2'-Fluoro-adenosine
  modified_base 15: mod_base = OTHER; note = 2'-O-methyl-adenosine
  modified_base 16: mod_base = OTHER; note = 2'-Fluoro-adenosine
  modified_base 17: mod_base = cm
  modified_base 18: mod_base = um
  modified_base 19: mod_base = um
  modified_base 20: mod_base = OTHER; note = 2'-Fluoro-uridine
  modified_base 21: mod_base = cm
  modified_base 21^22: mod_base = OTHER; note = Phosphorothioate bond
  modified_base 22: mod_base = OTHER; note = 2'-O-methyl-adenosine
  modified_base 22^23: mod_base = OTHER; note = Phosphorothioate bond
  modified_base 23: mod_base = um
cttagtagcagcaaaactttcat

SEQ ID NO: 802 - RNA, 23 nt, synthetic construct
  source 1..23: mol_type = other RNA
  modified_base 1: mod_base = um
  modified_base 1^2: mod_base = OTHER; note = Phosphorothioate bond
  modified_base 2: mod_base = OTHER; note = 2'-Fluoro-uridine
  modified_base 2^3: mod_base = OTHER; note = Phosphorothioate bond
  modified_base 3: mod_base = OTHER; note = 2'-O-methyl-adenosine
  modified_base 4: mod_base = OTHER; note = 2'-O-methyl-adenosine
  modified_base 5: mod_base = cm
  modified_base 6: mod_base = OTHER; note = 2'-Fluoro-guanosine
  modified_base 7: mod_base = gm
  modified_base 8: mod_base = OTHER; note = 2'-Fluoro-adenosine
  modified_base 9: mod_base = OTHER; note = 2'-Fluoro-cytidine
  modified_base 10: mod_base = um
  modified_base 11: mod_base = um
  modified_base 12: mod_base = gm
  modified_base 13: mod_base = OTHER; note = 2'-O-methyl-adenosine
  modified_base 14: mod_base = OTHER; note = 2'-Fluoro-guanosine
  modified_base 15: mod_base = OTHER; note = 2'-O-methyl-adenosine
  modified_base 16: mod_base = OTHER; note = 2'-Fluoro-guanosine
  modified_base 17: mod_base = OTHER; note = 2'-O-methyl-adenosine
  modified_base 18: mod_base = gm
  modified_base 19: mod_base = gm
  modified_base 20: mod_base = OTHER; note = 2'-Fluoro-adenosine
  modified_base 21: mod_base = gm
  modified_base 21^22: mod_base = OTHER; note = Phosphorothioate bond
  modified_base 22: mod_base = OTHER; note = 2'-O-methyl-adenosine
  modified_base 22^23: mod_base = OTHER; note = Phosphorothioate bond
  modified_base 23: mod_base = gm
ttaacggacttgagagaggagag

SEQ ID NO: 803 - RNA, 23 nt, synthetic construct
  source 1..23: mol_type = other RNA
  modified_base 1: mod_base = gm
  modified_base 1^2: mod_base = OTHER; note = Phosphorothioate bond
  modified_base 2: mod_base = OTHER; note = 2'-Fluoro-uridine
  modified_base 2^3: mod_base = OTHER; note = Phosphorothioate bond
  modified_base 3: mod_base = OTHER; note = 2'-O-methyl-adenosine
  modified_base 4: mod_base = gm
  modified_base 5: mod_base = um
  modified_base 6: mod_base = OTHER; note = 2'-Fluoro-uridine
  modified_base 7: mod_base = OTHER; note = 2'-O-methyl-adenosine
  modified_base 8: mod_base = OTHER; note = 2'-Fluoro-uridine
  modified_base 9: mod_base = OTHER; note = 2'-Fluoro-uridine
  modified_base 10: mod_base = cm
  modified_base 11: mod_base = um
  modified_base 12: mod_base = cm
  modified_base 13: mod_base = OTHER; note = 2'-O-methyl-adenosine
  modified_base 14: mod_base = OTHER; note = 2'-Fluoro-uridine
  modified_base 15: mod_base = cm
  modified_base 16: mod_base = OTHER; note = 2'-Fluoro-guanosine
  modified_base 17: mod_base = gm
  modified_base 18: mod_base = um
  modified_base 19: mod_base = cm
  modified_base 20: mod_base = OTHER; note = 2'-Fluoro-cytidine
  modified_base 21: mod_base = um
  modified_base 21^22: mod_base = OTHER; note = Phosphorothioate bond
  modified_base 22: mod_base = cm
  modified_base 22^23: mod_base = OTHER; note = Phosphorothioate bond
  modified_base 23: mod_base = um
gtagttattctcatcggtcctct

SEQ ID NO: 804 - RNA, 23 nt, synthetic construct
  source 1..23: mol_type = other RNA
  modified_base 1: mod_base = cm
  modified_base 1^2: mod_base = OTHER; note = Phosphorothioate bond
  modified_base 2: mod_base = OTHER; note = 2'-Fluoro-adenosine
  modified_base 2^3: mod_base = OTHER; note = Phosphorothioate bond
  modified_base 3: mod_base = OTHER; note = 2'-O-methyl-adenosine
  modified_base 4: mod_base = OTHER; note = 2'-O-methyl-adenosine
  modified_base 5: mod_base = OTHER; note = 2'-O-methyl-adenosine
  modified_base 6: mod_base = OTHER; note = 2'-Fluoro-cytidine
  modified_base 7: mod_base = um
  modified_base 8: mod_base = OTHER; note = 2'-Fluoro-uridine
  modified_base 9: mod_base = OTHER; note = 2'-Fluoro-uridine
  modified_base 10: mod_base = cm
  modified_base 11: mod_base = OTHER; note = 2'-O-methyl-adenosine
  modified_base 12: mod_base = um
  modified_base 13: mod_base = gm
  modified_base 14: mod_base = OTHER; note = 2'-Fluoro-adenosine
  modified_base 15: mod_base = um
  modified_base 16: mod_base = OTHER; note = 2'-Fluoro-guanosine
  modified_base 17: mod_base = gm
  modified_base 18: mod_base = um
  modified_base 19: mod_base = gm
  modified_base 20: mod_base = OTHER; note = 2'-Fluoro-uridine
  modified_base 21: mod_base = OTHER; note = 2'-O-methyl-adenosine
  modified_base 21^22: mod_base = OTHER; note = Phosphorothioate bond
  modified_base 22: mod_base = um
  modified_base 22^23: mod_base = OTHER; note = Phosphorothioate bond
  modified_base 23: mod_base = um
caaaactttcatgatggtgtatt

SEQ ID NO: 805 - RNA, 23 nt, synthetic construct
  source 1..23: mol_type = other RNA
  modified_base 1: mod_base = OTHER; note = 2'-O-methyl-adenosine
  modified_base 1^2: mod_base = OTHER; note = Phosphorothioate bond
  modified_base 2: mod_base = OTHER; note = 2'-Fluoro-adenosine
  modified_base 2^3: mod_base = OTHER; note = Phosphorothioate bond
  modified_base 3: mod_base = um
  modified_base 4: mod_base = um
  modified_base 5: mod_base = um
  modified_base 6: mod_base = OTHER; note = 2'-Fluoro-guanosine
  modified_base 7: mod_base = um
  modified_base 8: mod_base = OTHER; note = 2'-Fluoro-cytidine
  modified_base 9: mod_base = OTHER; note = 2'-Fluoro-cytidine
  modified_base 10: mod_base = um
  modified_base 11: mod_base = cm
  modified_base 12: mod_base = OTHER; note = 2'-O-methyl-adenosine
  modified_base 13: mod_base = um
  modified_base 14: mod_base = OTHER; note = 2'-Fluoro-uridine
  modified_base 15: mod_base = um
  modified_base 16: mod_base = OTHER; note = 2'-Fluoro-cytidine
  modified_base 17: mod_base = um
  modified_base 18: mod_base = um
  modified_base 19: mod_base = cm
  modified_base 20: mod_base = OTHER; note = 2'-Fluoro-adenosine
  modified_base 21: mod_base = OTHER; note = 2'-O-methyl-adenosine
  modified_base 21^22: mod_base = OTHER; note = Phosphorothioate bond
  modified_base 22: mod_base = OTHER; note = 2'-O-methyl-adenosine
  modified_base 22^23: mod_base = OTHER; note = Phosphorothioate bond
  modified_base 23: mod_base = um
aatttgtcctcatttcttcaaat

SEQ ID NO: 806 - RNA, 23 nt, synthetic construct
  source 1..23: mol_type = other RNA
  modified_base 1: mod_base = gm
  modified_base 1^2: mod_base = OTHER; note = Phosphorothioate bond
  modified_base 2: mod_base = OTHER; note = 2'-Fluoro-adenosine
  modified_base 2^3: mod_base = OTHER; note = Phosphorothioate bond
  modified_base 3: mod_base = OTHER; note = 2'-O-methyl-adenosine
  modified_base 4: mod_base = um
  modified_base 5: mod_base = OTHER; note = 2'-O-methyl-adenosine
  modified_base 6: mod_base = OTHER; note = 2'-Fluoro-adenosine
  modified_base 7: mod_base = um
  modified_base 8: mod_base = OTHER; note = 2'-Fluoro-adenosine
  modified_base 9: mod_base = OTHER; note = 2'-Fluoro-guanosine
  modified_base 10: mod_base = um
  modified_base 11: mod_base = cm
  modified_base 12: mod_base = um
  modified_base 13: mod_base = um
  modified_base 14: mod_base = OTHER; note = 2'-Fluoro-uridine
  modified_base 15: mod_base = OTHER; note = 2'-O-methyl-adenosine
  modified_base 16: mod_base = OTHER; note = 2'-Fluoro-uridine
  modified_base 17: mod_base = cm
  modified_base 18: mod_base = OTHER; note = 2'-O-methyl-adenosine
  modified_base 19: mod_base = um
  modified_base 20: mod_base = OTHER; note = 2'-Fluoro-cytidine
  modified_base 21: mod_base = cm
  modified_base 21^22: mod_base = OTHER; note = Phosphorothioate bond
  modified_base 22: mod_base = OTHER; note = 2'-O-methyl-adenosine
  modified_base 22^23: mod_base = OTHER; note = Phosphorothioate bond
  modified_base 23: mod_base = um
gaataatagtctttatcatccat

SEQ ID NO: 807 - RNA, 23 nt, synthetic construct
  source 1..23: mol_type = other RNA
  modified_base 1: mod_base = um
  modified_base 1^2: mod_base = OTHER; note = Phosphorothioate bond
  modified_base 2: mod_base = OTHER; note = 2'-Fluoro-uridine
  modified_base 2^3: mod_base = OTHER; note = Phosphorothioate bond
  modified_base 3: mod_base = OTHER; note = 2'-O-methyl-adenosine
  modified_base 4: mod_base = gm
  modified_base 5: mod_base = OTHER; note = 2'-O-methyl-adenosine
  modified_base 6: mod_base = OTHER; note = 2'-Fluoro-uridine
  modified_base 7: mod_base = um
  modified_base 8: mod_base = OTHER; note = 2'-Fluoro-cytidine
  modified_base 9: mod_base = OTHER; note = 2'-Fluoro-cytidine
  modified_base 10: mod_base = OTHER; note = 2'-O-methyl-adenosine
  modified_base 11: mod_base = gm
  modified_base 12: mod_base = cm
  modified_base 13: mod_base = um
  modified_base 14: mod_base = OTHER; note = 2'-Fluoro-cytidine
  modified_base 15: mod_base = OTHER; note = 2'-O-methyl-adenosine
  modified_base 16: mod_base = OTHER; note = 2'-Fluoro-guanosine
  modified_base 17: mod_base = um
  modified_base 18: mod_base = um
  modified_base 19: mod_base = um
  modified_base 20: mod_base = OTHER; note = 2'-Fluoro-uridine
  modified_base 21: mod_base = OTHER; note = 2'-O-methyl-adenosine
  modified_base 21^22: mod_base = OTHER; note = Phosphorothioate bond
  modified_base 22: mod_base = OTHER; note = 2'-O-methyl-adenosine
  modified_base 22^23: mod_base = OTHER; note = Phosphorothioate bond
  modified_base 23: mod_base = um
ttagattccagctcagttttaat

SEQ ID NO: 808 - RNA, 23 nt, synthetic construct
  source 1..23: mol_type = other RNA
  modified_base 1: mod_base = OTHER; note = 2'-O-methyl-adenosine
  modified_base 1^2: mod_base = OTHER; note = Phosphorothioate bond
  modified_base 2: mod_base = OTHER; note = 2'-Fluoro-cytidine
  modified_base 2^3: mod_base = OTHER; note = Phosphorothioate bond
  modified_base 3: mod_base = OTHER; note = 2'-O-methyl-adenosine
  modified_base 4: mod_base = OTHER; note = 2'-O-methyl-adenosine
  modified_base 5: mod_base = um
  modified_base 6: mod_base = OTHER; note = 2'-Fluoro-cytidine
  modified_base 7: mod_base = um
  modified_base 8: mod_base = OTHER; note = 2'-Fluoro-cytidine
  modified_base 9: mod_base = OTHER; note = 2'-Fluoro-cytidine
  modified_base 10: mod_base = OTHER; note = 2'-O-methyl-adenosine
  modified_base 11: mod_base = um
  modified_base 12: mod_base = gm
  modified_base 13: mod_base = um
  modified_base 14: mod_base = OTHER; note = 2'-Fluoro-adenosine
  modified_base 15: mod_base = gm
  modified_base 16: mod_base = OTHER; note = 2'-Fluoro-uridine
  modified_base 17: mod_base = um
  modified_base 18: mod_base = OTHER; note = 2'-O-methyl-adenosine
  modified_base 19: mod_base = um
  modified_base 20: mod_base = OTHER; note = 2'-Fluoro-uridine
  modified_base 21: mod_base = cm
  modified_base 21^22: mod_base = OTHER; note = Phosphorothioate bond
  modified_base 22: mod_base = um
  modified_base 22^23: mod_base = OTHER; note = Phosphorothioate bond
  modified_base 23: mod_base = cm
acaatctccatgtagttattctc

SEQ ID NO: 809 - RNA, 23 nt, synthetic construct
  source 1..23: mol_type = other RNA
  modified_base 1: mod_base = OTHER; note = 2'-O-methyl-adenosine
  modified_base 1^2: mod_base = OTHER; note = Phosphorothioate bond
  modified_base 2: mod_base = OTHER; note = 2'-Fluoro-guanosine
  modified_base 2^3: mod_base = OTHER; note = Phosphorothioate bond
  modified_base 3: mod_base = gm
  modified_base 4: mod_base = OTHER; note = 2'-O-methyl-adenosine
  modified_base 5: mod_base = OTHER; note = 2'-O-methyl-adenosine
  modified_base 6: mod_base = OTHER; note = 2'-Fluoro-uridine
  modified_base 7: mod_base = OTHER; note = 2'-O-methyl-adenosine
  modified_base 8: mod_base = OTHER; note = 2'-Fluoro-guanosine
  modified_base 9: mod_base = OTHER; note = 2'-Fluoro-uridine
  modified_base 10: mod_base = cm
  modified_base 11: mod_base = OTHER; note = 2'-O-methyl-adenosine
  modified_base 12: mod_base = gm
  modified_base 13: mod_base = cm
  modified_base 14: mod_base = OTHER; note = 2'-Fluoro-adenosine
  modified_base 15: mod_base = um
  modified_base 16: mod_base = OTHER; note = 2'-Fluoro-cytidine
  modified_base 17: mod_base = um
  modified_base 18: mod_base = cm
  modified_base 19: mod_base = um
  modified_base 20: mod_base = OTHER; note = 2'-Fluoro-uridine
  modified_base 21: mod_base = OTHER; note = 2'-O-methyl-adenosine
  modified_base 21^22: mod_base = OTHER; note = Phosphorothioate bond
  modified_base 22: mod_base = cm
  modified_base 22^23: mod_base = OTHER; note = Phosphorothioate bond
  modified_base 23: mod_base = OTHER; note = 2'-O-methyl-adenosine
aggaatagtcagcatctcttaca

SEQ ID NO: 810 - RNA, 23 nt, synthetic construct
  source 1..23: mol_type = other RNA
  modified_base 1: mod_base = OTHER; note = 2'-O-methyl-adenosine
  modified_base 1^2: mod_base = OTHER; note = Phosphorothioate bond
  modified_base 2: mod_base = OTHER; note = 2'-Fluoro-guanosine
  modified_base 2^3: mod_base = OTHER; note = Phosphorothioate bond
  modified_base 3: mod_base = cm
  modified_base 4: mod_base = OTHER; note = 2'-O-methyl-adenosine
  modified_base 5: mod_base = gm
  modified_base 6: mod_base = OTHER; note = 2'-Fluoro-cytidine
  modified_base 7: mod_base = OTHER; note = 2'-O-methyl-adenosine
  modified_base 8: mod_base = OTHER; note = 2'-Fluoro-adenosine
  modified_base 9: mod_base = OTHER; note = 2'-Fluoro-adenosine
  modified_base 10: mod_base = OTHER; note = 2'-O-methyl-adenosine
  modified_base 11: mod_base = cm
  modified_base 12: mod_base = um
  modified_base 13: mod_base = um
  modified_base 14: mod_base = OTHER; note = 2'-Fluoro-uridine
  modified_base 15: mod_base = cm
  modified_base 16: mod_base = OTHER; note = 2'-Fluoro-adenosine
  modified_base 17: mod_base = um
  modified_base 18: mod_base = gm
  modified_base 19: mod_base = OTHER; note = 2'-O-methyl-adenosine
  modified_base 20: mod_base = OTHER; note = 2'-Fluoro-uridine
  modified_base 21: mod_base = gm
  modified_base 21^22: mod_base = OTHER; note = Phosphorothioate bond
  modified_base 22: mod_base = gm
  modified_base 22^23: mod_base = OTHER; note = Phosphorothioate bond
  modified_base 23: mod_base = um
agcagcaaaactttcatgatggt

SEQ ID NO: 811 - RNA, 23 nt, synthetic construct
  source 1..23: mol_type = other RNA
  modified_base 1: mod_base = OTHER; note = 2'-O-methyl-adenosine
  modified_base 1^2: mod_base = OTHER; note = Phosphorothioate bond
  modified_base 2: mod_base = OTHER; note = 2'-Fluoro-uridine
  modified_base 2^3: mod_base = OTHER; note = Phosphorothioate bond
  modified_base 3: mod_base = cm
  modified_base 4: mod_base = um
  modified_base 5: mod_base = gm
  modified_base 6: mod_base = OTHER; note = 2'-Fluoro-guanosine
  modified_base 7: mod_base = um
  modified_base 8: mod_base = OTHER; note = 2'-Fluoro-uridine
  modified_base 9: mod_base = OTHER; note = 2'-Fluoro-cytidine
  modified_base 10: mod_base = um
  modified_base 11: mod_base = gm
  modified_base 12: mod_base = gm
  modified_base 13: mod_base = um
  modified_base 14: mod_base = OTHER; note = 2'-Fluoro-uridine
  modified_base 15: mod_base = um
  modified_base 16: mod_base = OTHER; note = 2'-Fluoro-uridine
  modified_base 17: mod_base = OTHER; note = 2'-O-methyl-adenosine
  modified_base 18: mod_base = um
  modified_base 19: mod_base = gm
  modified_base 20: mod_base = OTHER; note = 2'-Fluoro-uridine
  modified_base 21: mod_base = OTHER; note = 2'-O-methyl-adenosine
  modified_base 21^22: mod_base = OTHER; note = Phosphorothioate bond
  modified_base 22: mod_base = cm
  modified_base 22^23: mod_base = OTHER; note = Phosphorothioate bond
  modified_base 23: mod_base = um
atctggttctggttttatgtact

SEQ ID NO: 812 - RNA, 23 nt, synthetic construct
  source 1..23: mol_type = other RNA
  modified_base 1: mod_base = OTHER; note = 2'-O-methyl-adenosine
  modified_base 1^2: mod_base = OTHER; note = Phosphorothioate bond
  modified_base 2: mod_base = OTHER; note = 2'-Fluoro-adenosine
  modified_base 2^3: mod_base = OTHER; note = Phosphorothioate bond
  modified_base 3: mod_base = um
  modified_base 4: mod_base = um
  modified_base 5: mod_base = gm
  modified_base 6: mod_base = OTHER; note = 2'-Fluoro-uridine
  modified_base 7: mod_base = gm
  modified_base 8: mod_base = OTHER; note = 2'-Fluoro-cytidine
  modified_base 9: mod_base = OTHER; note = 2'-Fluoro-uridine
  modified_base 10: mod_base = um
  modified_base 11: mod_base = OTHER; note = 2'-O-methyl-adenosine
  modified_base 12: mod_base = gm
  modified_base 13: mod_base = um
  modified_base 14: mod_base = OTHER; note = 2'-Fluoro-adenosine
  modified_base 15: mod_base = gm
  modified_base 16: mod_base = OTHER; note = 2'-Fluoro-cytidine
  modified_base 17: mod_base = OTHER; note = 2'-O-methyl-adenosine
  modified_base 18: mod_base = gm
  modified_base 19: mod_base = cm
  modified_base 20: mod_base = OTHER; note = 2'-Fluoro-adenosine
  modified_base 21: mod_base = OTHER; note = 2'-O-methyl-adenosine
  modified_base 21^22: mod_base = OTHER; note = Phosphorothioate bond
  modified_base 22: mod_base = OTHER; note = 2'-O-methyl-adenosine
  modified_base 22^23: mod_base = OTHER; note = Phosphorothioate bond
  modified_base 23: mod_base = OTHER; note = 2'-O-methyl-adenosine
aattgtgcttagtagcagcaaaa

SEQ ID NO: 813 - RNA, 23 nt, synthetic construct
  source 1..23: mol_type = other RNA
  modified_base 1: mod_base = um
  modified_base 1^2: mod_base = OTHER; note = Phosphorothioate bond
  modified_base 2: mod_base = OTHER; note = 2'-Fluoro-uridine
  modified_base 2^3: mod_base = OTHER; note = Phosphorothioate bond
  modified_base 3: mod_base = cm
  modified_base 4: mod_base = OTHER; note = 2'-O-methyl-adenosine
  modified_base 5: mod_base = OTHER; note = 2'-O-methyl-adenosine
  modified_base 6: mod_base = OTHER; note = 2'-Fluoro-adenosine
  modified_base 7: mod_base = gm
  modified_base 8: mod_base = OTHER; note = 2'-Fluoro-guanosine
  modified_base 9: mod_base = OTHER; note = 2'-Fluoro-uridine
  modified_base 10: mod_base = gm
  modified_base 11: mod_base = OTHER; note = 2'-O-methyl-adenosine
  modified_base 12: mod_base = gm
  modified_base 13: mod_base = cm
  modified_base 14: mod_base = OTHER; note = 2'-Fluoro-uridine
  modified_base 15: mod_base = gm
  modified_base 16: mod_base = OTHER; note = 2'-Fluoro-cytidine
  modified_base 17: mod_base = OTHER; note = 2'-O-methyl-adenosine
  modified_base 18: mod_base = gm
  modified_base 19: mod_base = um
  modified_base 20: mod_base = OTHER; note = 2'-Fluoro-cytidine
  modified_base 21: mod_base = gm
  modified_base 21^22: mod_base = OTHER; note = Phosphorothioate bond
  modified_base 22: mod_base = OTHER; note = 2'-O-methyl-adenosine
  modified_base 22^23: mod_base = OTHER; note = Phosphorothioate bond
  modified_base 23: mod_base = OTHER; note = 2'-O-methyl-adenosine
ttcaaaggtgagctgcagtcgaa

SEQ ID NO: 814 - RNA, 23 nt, synthetic construct
  source 1..23: mol_type = other RNA
  modified_base 1: mod_base = um
  modified_base 1^2: mod_base = OTHER; note = Phosphorothioate bond
  modified_base 2: mod_base = OTHER; note = 2'-Fluoro-adenosine
  modified_base 2^3: mod_base = OTHER; note = Phosphorothioate bond
  modified_base 3: mod_base = gm
  modified_base 4: mod_base = OTHER; note = 2'-O-methyl-adenosine
  modified_base 5: mod_base = um
  modified_base 6: mod_base = OTHER; note = 2'-Fluoro-uridine
  modified_base 7: mod_base = cm
  modified_base 8: mod_base = OTHER; note = 2'-Fluoro-cytidine
  modified_base 9: mod_base = OTHER; note = 2'-Fluoro-adenosine
  modified_base 10: mod_base = gm
  modified_base 11: mod_base = cm
  modified_base 12: mod_base = um
  modified_base 13: mod_base = cm
  modified_base 14: mod_base = OTHER; note = 2'-Fluoro-adenosine
  modified_base 15: mod_base = gm
  modified_base 16: mod_base = OTHER; note = 2'-Fluoro-uridine
  modified_base 17: mod_base = um
  modified_base 18: mod_base = um
  modified_base 19: mod_base = um
  modified_base 20: mod_base = OTHER; note = 2'-Fluoro-adenosine
  modified_base 21: mod_base = OTHER; note = 2'-O-methyl-adenosine
  modified_base 21^22: mod_base = OTHER; note = Phosphorothioate bond
  modified_base 22: mod_base = um
  modified_base 22^23: mod_base = OTHER; note = Phosphorothioate bond
  modified_base 23: mod_base = OTHER; note = 2'-O-methyl-adenosine
tagattccagctcagttttaata

SEQ ID NO: 815 - RNA, 23 nt, synthetic construct
  source 1..23: mol_type = other RNA
  modified_base 1: mod_base = gm
  modified_base 1^2: mod_base = OTHER; note = Phosphorothioate bond
  modified_base 2: mod_base = OTHER; note = 2'-Fluoro-uridine
  modified_base 2^3: mod_base = OTHER; note = Phosphorothioate bond
  modified_base 3: mod_base = gm
  modified_base 4: mod_base = OTHER; note = 2'-O-methyl-adenosine
  modified_base 5: mod_base = um
  modified_base 6: mod_base = OTHER; note = 2'-Fluoro-uridine
  modified_base 7: mod_base = um
  modified_base 8: mod_base = OTHER; note = 2'-Fluoro-cytidine
  modified_base 9: mod_base = OTHER; note = 2'-Fluoro-cytidine
  modified_base 10: mod_base = OTHER; note = 2'-O-methyl-adenosine
  modified_base 11: mod_base = um
  modified_base 12: mod_base = gm
  modified_base 13: mod_base = OTHER; note = 2'-O-methyl-adenosine
  modified_base 14: mod_base = OTHER; note = 2'-Fluoro-cytidine
  modified_base 15: mod_base = um
  modified_base 16: mod_base = OTHER; note = 2'-Fluoro-cytidine
  modified_base 17: mod_base = cm
  modified_base 18: mod_base = OTHER; note = 2'-O-methyl-adenosine
  modified_base 19: mod_base = cm
  modified_base 20: mod_base = OTHER; note = 2'-Fluoro-uridine
  modified_base 21: mod_base = OTHER; note = 2'-O-methyl-adenosine
  modified_base 21^22: mod_base = OTHER; note = Phosphorothioate bond
  modified_base 22: mod_base = OTHER; note = 2'-O-methyl-adenosine
  modified_base 22^23: mod_base = OTHER; note = Phosphorothioate bond
  modified_base 23: mod_base = OTHER; note = 2'-O-methyl-adenosine
gtgatttccatgactccactaaa

SEQ ID NO: 816 - RNA, 23 nt, synthetic construct
  source 1..23: mol_type = other RNA
  modified_base 1: mod_base = gm
  modified_base 1^2: mod_base = OTHER; note = Phosphorothioate bond
  modified_base 2: mod_base = OTHER; note = 2'-Fluoro-uridine
  modified_base 2^3: mod_base = OTHER; note = Phosphorothioate bond
  modified_base 3: mod_base = gm
  modified_base 4: mod_base = cm
  modified_base 5: mod_base = um
  modified_base 6: mod_base = OTHER; note = 2'-Fluoro-uridine
  modified_base 7: mod_base = OTHER; note = 2'-O-methyl-adenosine
  modified_base 8: mod_base = OTHER; note = 2'-Fluoro-guanosine
  modified_base 9: mod_base = OTHER; note = 2'-Fluoro-uridine
  modified_base 10: mod_base = OTHER; note = 2'-O-methyl-adenosine
  modified_base 11: mod_base = gm
  modified_base 12: mod_base = cm
  modified_base 13: mod_base = OTHER; note = 2'-O-methyl-adenosine
  modified_base 14: mod_base = OTHER; note = 2'-Fluoro-guanosine
  modified_base 15: mod_base = cm
  modified_base 16: mod_base = OTHER; note = 2'-Fluoro-adenosine
  modified_base 17: mod_base = OTHER; note = 2'-O-methyl-adenosine
  modified_base 18: mod_base = OTHER; note = 2'-O-methyl-adenosine
  modified_base 19: mod_base = OTHER; note = 2'-O-methyl-adenosine
  modified_base 20: mod_base = OTHER; note = 2'-Fluoro-cytidine
  modified_base 21: mod_base = um
  modified_base 21^22: mod_base = OTHER; note = Phosphorothioate bond
  modified_base 22: mod_base = um
  modified_base 22^23: mod_base = OTHER; note = Phosphorothioate bond
  modified_base 23: mod_base = um
gtgcttagtagcagcaaaacttt

SEQ ID NO: 817 - RNA, 23 nt, synthetic construct
  source 1..23: mol_type = other RNA
  modified_base 1: mod_base = um
  modified_base 1^2: mod_base = OTHER; note = Phosphorothioate bond
  modified_base 2: mod_base = OTHER; note = 2'-Fluoro-adenosine
  modified_base 2^3: mod_base = OTHER; note = Phosphorothioate bond
  modified_base 3: mod_base = OTHER; note = 2'-O-methyl-adenosine
  modified_base 4: mod_base = um
  modified_base 5: mod_base = um
  modified_base 6: mod_base = OTHER; note = 2'-Fluoro-uridine
  modified_base 7: mod_base = gm
  modified_base 8: mod_base = OTHER; note = 2'-Fluoro-uridine
  modified_base 9: mod_base = OTHER; note = 2'-Fluoro-cytidine
  modified_base 10: mod_base = cm
  modified_base 11: mod_base = um
  modified_base 12: mod_base = cm
  modified_base 13: mod_base = OTHER; note = 2'-O-methyl-adenosine
  modified_base 14: mod_base = OTHER; note = 2'-Fluoro-uridine
  modified_base 15: mod_base = um
  modified_base 16: mod_base = OTHER; note = 2'-Fluoro-uridine
  modified_base 17: mod_base = cm
  modified_base 18: mod_base = um
  modified_base 19: mod_base = um
  modified_base 20: mod_base = OTHER; note = 2'-Fluoro-cytidine
  modified_base 21: mod_base = OTHER; note = 2'-O-methyl-adenosine
  modified_base 21^22: mod_base = OTHER; note = Phosphorothioate bond
  modified_base 22: mod_base = OTHER; note = 2'-O-methyl-adenosine
  modified_base 22^23: mod_base = OTHER; note = Phosphorothioate bond
  modified_base 23: mod_base = OTHER; note = 2'-O-methyl-adenosine
taatttgtcctcatttcttcaaa

SEQ ID NO: 818 - RNA, 23 nt, synthetic construct
  source 1..23: mol_type = other RNA
  modified_base 1: mod_base = um
  modified_base 1^2: mod_base = OTHER; note = Phosphorothioate bond
  modified_base 2: mod_base = OTHER; note = 2'-Fluoro-uridine
  modified_base 2^3: mod_base = OTHER; note = Phosphorothioate bond
  modified_base 3: mod_base = um
  modified_base 4: mod_base = cm
  modified_base 5: mod_base = um
  modified_base 6: mod_base = OTHER; note = 2'-Fluoro-uridine
  modified_base 7: mod_base = um
  modified_base 8: mod_base = OTHER; note = 2'-Fluoro-guanosine
  modified_base 9: mod_base = OTHER; note = 2'-Fluoro-cytidine
  modified_base 10: mod_base = um
  modified_base 11: mod_base = gm
  modified_base 12: mod_base = cm
  modified_base 13: mod_base = um
  modified_base 14: mod_base = OTHER; note = 2'-Fluoro-uridine
  modified_base 15: mod_base = cm
  modified_base 16: mod_base = OTHER; note = 2'-Fluoro-cytidine
  modified_base 17: mod_base = um
  modified_base 18: mod_base = um
  modified_base 19: mod_base = gm
  modified_base 20: mod_base = OTHER; note = 2'-Fluoro-adenosine
  modified_base 21: mod_base = gm
  modified_base 21^22: mod_base = OTHER; note = Phosphorothioate bond
  modified_base 22: mod_base = um
  modified_base 22^23: mod_base = OTHER; note = Phosphorothioate bond
  modified_base 23: mod_base = OTHER; note = 2'-O-methyl-adenosine
tttctttgctgcttccttgagta

SEQ ID NO: 819 - RNA, 23 nt, synthetic construct
  source 1..23: mol_type = other RNA
  modified_base 1: mod_base = um
  modified_base 1^2: mod_base = OTHER; note = Phosphorothioate bond
  modified_base 2: mod_base = OTHER; note = 2'-Fluoro-cytidine
  modified_base 2^3: mod_base = OTHER; note = Phosphorothioate bond
  modified_base 3: mod_base = um
  modified_base 4: mod_base = cm
  modified_base 5: mod_base = um
  modified_base 6: mod_base = OTHER; note = 2'-Fluoro-uridine
  modified_base 7: mod_base = OTHER; note = 2'-O-methyl-adenosine
  modified_base 8: mod_base = OTHER; note = 2'-Fluoro-cytidine
  modified_base 9: mod_base = OTHER; note = 2'-Fluoro-adenosine
  modified_base 10: mod_base = gm
  modified_base 11: mod_base = OTHER; note = 2'-O-methyl-adenosine
  modified_base 12: mod_base = OTHER; note = 2'-O-methyl-adenosine
  modified_base 13: mod_base = um
  modified_base 14: mod_base = OTHER; note = 2'-Fluoro-cytidine
  modified_base 15: mod_base = cm
  modified_base 16: mod_base = OTHER; note = 2'-Fluoro-adenosine
  modified_base 17: mod_base = um
  modified_base 18: mod_base = OTHER; note = 2'-O-methyl-adenosine
  modified_base 19: mod_base = um
  modified_base 20: mod_base = OTHER; note = 2'-Fluoro-adenosine
  modified_base 21: mod_base = um
  modified_base 21^22: mod_base = OTHER; note = Phosphorothioate bond
  modified_base 22: mod_base = OTHER; note = 2'-O-methyl-adenosine
  modified_base 22^23: mod_base = OTHER; note = Phosphorothioate bond
  modified_base 23: mod_base = OTHER; note = 2'-O-methyl-adenosine
tctcttacagaatccatatataa

SEQ ID NO: 820 - RNA, 23 nt, synthetic construct
  source 1..23: mol_type = other RNA
  modified_base 1: mod_base = OTHER; note = 2'-O-methyl-adenosine
  modified_base 1^2: mod_base = OTHER; note = Phosphorothioate bond
  modified_base 2: mod_base = OTHER; note = 2'-Fluoro-uridine
  modified_base 2^3: mod_base = OTHER; note = Phosphorothioate bond
  modified_base 3: mod_base = um
  modified_base 4: mod_base = gm
  modified_base 5: mod_base = um
  modified_base 6: mod_base = OTHER; note = 2'-Fluoro-uridine
  modified_base 7: mod_base = gm
  modified_base 8: mod_base = OTHER; note = 2'-Fluoro-guanosine
  modified_base 9: mod_base = OTHER; note = 2'-Fluoro-guanosine
  modified_base 10: mod_base = OTHER; note = 2'-O-methyl-adenosine
  modified_base 11: mod_base = cm
  modified_base 12: mod_base = OTHER; note = 2'-O-methyl-adenosine
  modified_base 13: mod_base = cm
  modified_base 14: mod_base = OTHER; note = 2'-Fluoro-uridine
  modified_base 15: mod_base = um
  modified_base 16: mod_base = OTHER; note = 2'-Fluoro-adenosine
  modified_base 17: mod_base = gm
  modified_base 18: mod_base = um
  modified_base 19: mod_base = um
  modified_base 20: mod_base = OTHER; note = 2'-Fluoro-adenosine
  modified_base 21: mod_base = cm
  modified_base 21^22: mod_base = OTHER; note = Phosphorothioate bond
  modified_base 22: mod_base = cm
  modified_base 22^23: mod_base = OTHER; note = Phosphorothioate bond
  modified_base 23: mod_base = OTHER; note = 2'-O-methyl-adenosine
attgttgggacacttagttacca

SEQ ID NO: 821 - RNA, 23 nt, synthetic construct
  source 1..23: mol_type = other RNA
  modified_base 1: mod_base = OTHER; note = 2'-O-methyl-adenosine
  modified_base 1^2: mod_base = OTHER; note = Phosphorothioate bond
  modified_base 2: mod_base = OTHER; note = 2'-Fluoro-cytidine
  modified_base 2^3: mod_base = OTHER; note = Phosphorothioate bond
  modified_base 3: mod_base = um
  modified_base 4: mod_base = um
  modified_base 5: mod_base = cm
  modified_base 6: mod_base = OTHER; note = 2'-Fluoro-guanosine
  modified_base 7: mod_base = um
  modified_base 8: mod_base = OTHER; note = 2'-Fluoro-adenosine
  modified_base 9: mod_base = OTHER; note = 2'-Fluoro-adenosine
  modified_base 10: mod_base = OTHER; note = 2'-O-methyl-adenosine
  modified_base 11: mod_base = gm
  modified_base 12: mod_base = um
  modified_base 13: mod_base = OTHER; note = 2'-O-methyl-adenosine
  modified_base 14: mod_base = OTHER; note = 2'-Fluoro-guanosine
  modified_base 15: mod_base = OTHER; note = 2'-O-methyl-adenosine
  modified_base 16: mod_base = OTHER; note = 2'-Fluoro-guanosine
  modified_base 17: mod_base = cm
  modified_base 18: mod_base = um
  modified_base 19: mod_base = um
  modified_base 20: mod_base = OTHER; note = 2'-Fluoro-guanosine
  modified_base 21: mod_base = OTHER; note = 2'-O-methyl-adenosine
  modified_base 21^22: mod_base = OTHER; note = Phosphorothioate bond
  modified_base 22: mod_base = um
  modified_base 22^23: mod_base = OTHER; note = Phosphorothioate bond
  modified_base 23: mod_base = OTHER; note = 2'-O-methyl-adenosine
acttcgtaaagtagagcttgata

SEQ ID NO: 822 - RNA, 23 nt, synthetic construct
  source 1..23: mol_type = other RNA
  modified_base 1: mod_base = um
  modified_base 1^2: mod_base = OTHER; note = Phosphorothioate bond
  modified_base 2: mod_base = OTHER; note = 2'-Fluoro-adenosine
  modified_base 2^3: mod_base = OTHER; note = Phosphorothioate bond
  modified_base 3: mod_base = gm
  modified_base 4: mod_base = um
  modified_base 5: mod_base = um
  modified_base 6: mod_base = OTHER; note = 2'-Fluoro-adenosine
  modified_base 7: mod_base = um
  modified_base 8: mod_base = OTHER; note = 2'-Fluoro-uridine
  modified_base 9: mod_base = OTHER; note = 2'-Fluoro-cytidine
  modified_base 10: mod_base = um
  modified_base 11: mod_base = cm
  modified_base 12: mod_base = OTHER; note = 2'-O-methyl-adenosine
  modified_base 13: mod_base = um
  modified_base 14: mod_base = OTHER; note = 2'-Fluoro-cytidine
  modified_base 15: mod_base = gm
  modified_base 16: mod_base = OTHER; note = 2'-Fluoro-guanosine
  modified_base 17: mod_base = um
  modified_base 18: mod_base = cm
  modified_base 19: mod_base = cm
  modified_base 20: mod_base = OTHER; note = 2'-Fluoro-uridine
  modified_base 21: mod_base = cm
  modified_base 21^22: mod_base = OTHER; note = Phosphorothioate bond
  modified_base 22: mod_base = um
  modified_base 22^23: mod_base = OTHER; note = Phosphorothioate bond
  modified_base 23: mod_base = cm
tagttattctcatcggtcctctc

SEQ ID NO: 823 - RNA, 23 nt, synthetic construct
  source 1..23: mol_type = other RNA
  modified_base 1: mod_base = um
  modified_base 1^2: mod_base = OTHER; note = Phosphorothioate bond
  modified_base 2: mod_base = OTHER; note = 2'-Fluoro-adenosine
  modified_base 2^3: mod_base = OTHER; note = Phosphorothioate bond
  modified_base 3: mod_base = gm
  modified_base 4: mod_base = OTHER; note = 2'-O-methyl-adenosine
  modified_base 5: mod_base = cm
  modified_base 6: mod_base = OTHER; note = 2'-Fluoro-adenosine
  modified_base 7: mod_base = um
  modified_base 8: mod_base = OTHER; note = 2'-Fluoro-guanosine
  modified_base 9: mod_base = OTHER; note = 2'-Fluoro-adenosine
  modified_base 10: mod_base = gm
  modified_base 11: mod_base = cm
  modified_base 12: mod_base = um
  modified_base 13: mod_base = gm
  modified_base 14: mod_base = OTHER; note = 2'-Fluoro-cytidine
  modified_base 15: mod_base = um
  modified_base 16: mod_base = OTHER; note = 2'-Fluoro-adenosine
  modified_base 17: mod_base = OTHER; note = 2'-O-methyl-adenosine
  modified_base 18: mod_base = OTHER; note = 2'-O-methyl-adenosine
  modified_base 19: mod_base = OTHER; note = 2'-O-methyl-adenosine
  modified_base 20: mod_base = OTHER; note = 2'-Fluoro-guanosine
  modified_base 21: mod_base = cm
  modified_base 21^22: mod_base = OTHER; note = Phosphorothioate bond
  modified_base 22: mod_base = um
  modified_base 22^23: mod_base = OTHER; note = Phosphorothioate bond
  modified_base 23: mod_base = cm
tagacatgagctgctaaaagctc

SEQ ID NO: 824 - RNA, 23 nt, synthetic construct
  source 1..23: mol_type = other RNA
  modified_base 1: mod_base = OTHER; note = 2'-O-methyl-adenosine
  modified_base 1^2: mod_base = OTHER; note = Phosphorothioate bond
  modified_base 2: mod_base = OTHER; note = 2'-Fluoro-guanosine
  modified_base 2^3: mod_base = OTHER; note = Phosphorothioate bond
  modified_base 3: mod_base = cm
  modified_base 4: mod_base = um
  modified_base 5: mod_base = gm
  modified_base 6: mod_base = OTHER; note = 2'-Fluoro-uridine
  modified_base 7: mod_base = um
  modified_base 8: mod_base = OTHER; note = 2'-Fluoro-cytidine
  modified_base 9: mod_base = OTHER; note = 2'-Fluoro-adenosine
  modified_base 10: mod_base = OTHER; note = 2'-O-methyl-adenosine
  modified_base 11: mod_base = cm
  modified_base 12: mod_base = OTHER; note = 2'-O-methyl-adenosine
  modified_base 13: mod_base = um
  modified_base 14: mod_base = OTHER; note = 2'-Fluoro-uridine
  modified_base 15: mod_base = cm
  modified_base 16: mod_base = OTHER; note = 2'-Fluoro-uridine
  modified_base 17: mod_base = gm
  modified_base 18: mod_base = OTHER; note = 2'-O-methyl-adenosine
  modified_base 19: mod_base = um
  modified_base 20: mod_base = OTHER; note = 2'-Fluoro-adenosine
  modified_base 21: mod_base = OTHER; note = 2'-O-methyl-adenosine
  modified_base 21^22: mod_base = OTHER; note = Phosphorothioate bond
  modified_base 22: mod_base = OTHER; note = 2'-O-methyl-adenosine
  modified_base 22^23: mod_base = OTHER; note = Phosphorothioate bond
  modified_base 23: mod_base = um
agctgttcaacattctgataaat

SEQ ID NO: 825 - RNA, 23 nt, synthetic construct
  source 1..23: mol_type = other RNA
  modified_base 1: mod_base = cm
  modified_base 1^2: mod_base = OTHER; note = Phosphorothioate bond
  modified_base 2: mod_base = OTHER; note = 2'-Fluoro-guanosine
  modified_base 2^3: mod_base = OTHER; note = Phosphorothioate bond
  modified_base 3: mod_base = um
  modified_base 4: mod_base = OTHER; note = 2'-O-methyl-adenosine
  modified_base 5: mod_base = OTHER; note = 2'-O-methyl-adenosine
  modified_base 6: mod_base = OTHER; note = 2'-Fluoro-adenosine
  modified_base 7: mod_base = gm
  modified_base 8: mod_base = OTHER; note = 2'-Fluoro-uridine
  modified_base 9: mod_base = OTHER; note = 2'-Fluoro-adenosine
  modified_base 10: mod_base = gm
  modified_base 11: mod_base = OTHER; note = 2'-O-methyl-adenosine
  modified_base 12: mod_base = gm
  modified_base 13: mod_base = cm
  modified_base 14: mod_base = OTHER; note = 2'-Fluoro-uridine
  modified_base 15: mod_base = um
  modified_base 16: mod_base = OTHER; note = 2'-Fluoro-guanosine
  modified_base 17: mod_base = OTHER; note = 2'-O-methyl-adenosine
  modified_base 18: mod_base = um
  modified_base 19: mod_base = OTHER; note = 2'-O-methyl-adenosine
  modified_base 20: mod_base = OTHER; note = 2'-Fluoro-cytidine
  modified_base 21: mod_base = OTHER; note = 2'-O-methyl-adenosine
  modified_base 21^22: mod_base = OTHER; note = Phosphorothioate bond
  modified_base 22: mod_base = um
  modified_base 22^23: mod_base = OTHER; note = Phosphorothioate bond
  modified_base 23: mod_base = um
cgtaaagtagagcttgatacatt

SEQ ID NO: 826 - RNA, 23 nt, synthetic construct
  source 1..23: mol_type = other RNA
  modified_base 1: mod_base = um
  modified_base 1^2: mod_base = OTHER; note = Phosphorothioate bond
  modified_base 2: mod_base = OTHER; note = 2'-Fluoro-uridine
  modified_base 2^3: mod_base = OTHER; note = Phosphorothioate bond
  modified_base 3: mod_base = gm
  modified_base 4: mod_base = OTHER; note = 2'-O-methyl-adenosine
  modified_base 5: mod_base = gm
  modified_base 6: mod_base = OTHER; note = 2'-Fluoro-uridine
  modified_base 7: mod_base = OTHER; note = 2'-O-methyl-adenosine
  modified_base 8: mod_base = OTHER; note = 2'-Fluoro-cytidine
  modified_base 9: mod_base = OTHER; note = 2'-Fluoro-uridine
  modified_base 10: mod_base = gm
  modified_base 11: mod_base = um
  modified_base 12: mod_base = um
  modified_base 13: mod_base = gm
  modified_base 14: mod_base = OTHER; note = 2'-Fluoro-uridine
  modified_base 15: mod_base = um
  modified_base 16: mod_base = OTHER; note = 2'-Fluoro-uridine
  modified_base 17: mod_base = gm
  modified_base 18: mod_base = gm
  modified_base 19: mod_base = OTHER; note = 2'-O-methyl-adenosine
  modified_base 20: mod_base = OTHER; note = 2'-Fluoro-adenosine
  modified_base 21: mod_base = um
  modified_base 21^22: mod_base = OTHER; note = Phosphorothioate bond
  modified_base 22: mod_base = OTHER; note = 2'-O-methyl-adenosine
  modified_base 22^23: mod_base = OTHER; note = Phosphorothioate bond
  modified_base 23: mod_base = gm
ttgagtactgttgtttggaatag

SEQ ID NO: 827 - RNA, 23 nt, synthetic construct
  source 1..23: mol_type = other RNA
  modified_base 1: mod_base = um
  modified_base 1^2: mod_base = OTHER; note = Phosphorothioate bond
  modified_base 2: mod_base = OTHER; note = 2'-Fluoro-guanosine
  modified_base 2^3: mod_base = OTHER; note = Phosphorothioate bond
  modified_base 3: mod_base = OTHER; note = 2'-O-methyl-adenosine
  modified_base 4: mod_base = um
  modified_base 5: mod_base = OTHER; note = 2'-O-methyl-adenosine
  modified_base 6: mod_base = OTHER; note = 2'-Fluoro-guanosine
  modified_base 7: mod_base = gm
  modified_base 8: mod_base = OTHER; note = 2'-Fluoro-guanosine
  modified_base 9: mod_base = OTHER; note = 2'-Fluoro-adenosine
  modified_base 10: mod_base = OTHER; note = 2'-O-methyl-adenosine
  modified_base 11: mod_base = um
  modified_base 12: mod_base = OTHER; note = 2'-O-methyl-adenosine
  modified_base 13: mod_base = OTHER; note = 2'-O-methyl-adenosine
  modified_base 14: mod_base = OTHER; note = 2'-Fluoro-uridine
  modified_base 15: mod_base = OTHER; note = 2'-O-methyl-adenosine
  modified_base 16: mod_base = OTHER; note = 2'-Fluoro-guanosine
  modified_base 17: mod_base = um
  modified_base 18: mod_base = cm
  modified_base 19: mod_base = um
  modified_base 20: mod_base = OTHER; note = 2'-Fluoro-uridine
  modified_base 21: mod_base = um
  modified_base 21^22: mod_base = OTHER; note = Phosphorothioate bond
  modified_base 22: mod_base = OTHER; note = 2'-O-methyl-adenosine
  modified_base 22^23: mod_base = OTHER; note = Phosphorothioate bond
  modified_base 23: mod_base = um
tgatagggaataatagtctttat

SEQ ID NO: 828 - RNA, 23 nt, synthetic construct
  source 1..23: mol_type = other RNA
  modified_base 1: mod_base = OTHER; note = 2'-O-methyl-adenosine
  modified_base 1^2: mod_base = OTHER; note = Phosphorothioate bond
  modified_base 2: mod_base = OTHER; note = 2'-Fluoro-adenosine
  modified_base 2^3: mod_base = OTHER; note = Phosphorothioate bond
  modified_base 3: mod_base = OTHER; note = 2'-O-methyl-adenosine
  modified_base 4: mod_base = cm
  modified_base 5: mod_base = cm
  modified_base 6: mod_base = OTHER; note = 2'-Fluoro-guanosine
  modified_base 7: mod_base = OTHER; note = 2'-O-methyl-adenosine
  modified_base 8: mod_base = OTHER; note = 2'-Fluoro-adenosine
  modified_base 9: mod_base = OTHER; note = 2'-Fluoro-guanosine
  modified_base 10: mod_base = OTHER; note = 2'-O-methyl-adenosine
  modified_base 11: mod_base = um
  modified_base 12: mod_base = gm
  modified_base 13: mod_base = um
  modified_base 14: mod_base = OTHER; note = 2'-Fluoro-cytidine
  modified_base 15: mod_base = OTHER; note = 2'-O-methyl-adenosine
  modified_base 16: mod_base = OTHER; note = 2'-Fluoro-uridine
  modified_base 17: mod_base = gm
  modified_base 18: mod_base = um
  modified_base 19: mod_base = um
  modified_base 20: mod_base = OTHER; note = 2'-Fluoro-cytidine
  modified_base 21: mod_base = OTHER; note = 2'-O-methyl-adenosine
  modified_base 21^22: mod_base = OTHER; note = Phosphorothioate bond
  modified_base 22: mod_base = gm
  modified_base 22^23: mod_base = OTHER; note = Phosphorothioate bond
  modified_base 23: mod_base = OTHER; note = 2'-O-methyl-adenosine
aaaccgaagatgtcatgttcaga

SEQ ID NO: 829 - RNA, 23 nt, synthetic construct
  source 1..23: mol_type = other RNA
  modified_base 1: mod_base = OTHER; note = 2'-O-methyl-adenosine
  modified_base 1^2: mod_base = OTHER; note = Phosphorothioate bond
  modified_base 2: mod_base = OTHER; note = 2'-Fluoro-adenosine
  modified_base 2^3: mod_base = OTHER; note = Phosphorothioate bond
  modified_base 3: mod_base = um
  modified_base 4: mod_base = um
  modified_base 5: mod_base = um
  modified_base 6: mod_base = OTHER; note = 2'-Fluoro-cytidine
  modified_base 7: mod_base = OTHER; note = 2'-O-methyl-adenosine
  modified_base 8: mod_base = OTHER; note = 2'-Fluoro-cytidine
  modified_base 9: mod_base = OTHER; note = 2'-Fluoro-cytidine
  modified_base 10: mod_base = OTHER; note = 2'-O-methyl-adenosine
  modified_base 11: mod_base = gm
  modified_base 12: mod_base = cm
  modified_base 13: mod_base = um
  modified_base 14: mod_base = OTHER; note = 2'-Fluoro-guanosine
  modified_base 15: mod_base = um
  modified_base 16: mod_base = OTHER; note = 2'-Fluoro-uridine
  modified_base 17: mod_base = cm
  modified_base 18: mod_base = OTHER; note = 2'-O-methyl-adenosine
  modified_base 19: mod_base = OTHER; note = 2'-O-methyl-adenosine
  modified_base 20: mod_base = OTHER; note = 2'-Fluoro-cytidine
  modified_base 21: mod_base = OTHER; note = 2'-O-methyl-adenosine
  modified_base 21^22: mod_base = OTHER; note = Phosphorothioate bond
  modified_base 22: mod_base = um
  modified_base 22^23: mod_base = OTHER; note = Phosphorothioate bond
  modified_base 23: mod_base = um
aatttcaccagctgttcaacatt

SEQ ID NO: 830 - RNA, 23 nt, synthetic construct
  source 1..23: mol_type = other RNA
  modified_base 1: mod_base = gm
  modified_base 1^2: mod_base = OTHER; note = Phosphorothioate bond
  modified_base 2: mod_base = OTHER; note = 2'-Fluoro-guanosine
  modified_base 2^3: mod_base = OTHER; note = Phosphorothioate bond
  modified_base 3: mod_base = gm
  modified_base 4: mod_base = OTHER; note = 2'-O-methyl-adenosine
  modified_base 5: mod_base = OTHER; note = 2'-O-methyl-adenosine
  modified_base 6: mod_base = OTHER; note = 2'-Fluoro-uridine
  modified_base 7: mod_base = OTHER; note = 2'-O-methyl-adenosine
  modified_base 8: mod_base = OTHER; note = 2'-Fluoro-adenosine
  modified_base 9: mod_base = OTHER; note = 2'-Fluoro-uridine
  modified_base 10: mod_base = OTHER; note = 2'-O-methyl-adenosine
  modified_base 11: mod_base = gm
  modified_base 12: mod_base = um
  modified_base 13: mod_base = cm
  modified_base 14: mod_base = OTHER; note = 2'-Fluoro-uridine
  modified_base 15: mod_base = um
  modified_base 16: mod_base = OTHER; note = 2'-Fluoro-uridine
  modified_base 17: mod_base = OTHER; note = 2'-O-methyl-adenosine
  modified_base 18: mod_base = um
  modified_base 19: mod_base = cm
  modified_base 20: mod_base = OTHER; note = 2'-Fluoro-adenosine
  modified_base 21: mod_base = um
  modified_base 21^22: mod_base = OTHER; note = Phosphorothioate bond
  modified_base 22: mod_base = cm
  modified_base 22^23: mod_base = OTHER; note = Phosphorothioate bond
  modified_base 23: mod_base = cm
gggaataatagtctttatcatcc

SEQ ID NO: 831 - RNA, 23 nt, synthetic construct
  source 1..23: mol_type = other RNA
  modified_base 1: mod_base = OTHER; note = 2'-O-methyl-adenosine
  modified_base 1^2: mod_base = OTHER; note = Phosphorothioate bond
  modified_base 2: mod_base = OTHER; note = 2'-Fluoro-guanosine
  modified_base 2^3: mod_base = OTHER; note = Phosphorothioate bond
  modified_base 3: mod_base = cm
  modified_base 4: mod_base = um
  modified_base 5: mod_base = um
  modified_base 6: mod_base = OTHER; note = 2'-Fluoro-guanosine
  modified_base 7: mod_base = OTHER; note = 2'-O-methyl-adenosine
  modified_base 8: mod_base = OTHER; note = 2'-Fluoro-uridine
  modified_base 9: mod_base = OTHER; note = 2'-Fluoro-adenosine
  modified_base 10: mod_base = cm
  modified_base 11: mod_base = OTHER; note = 2'-O-methyl-adenosine
  modified_base 12: mod_base = um
  modified_base 13: mod_base = um
  modified_base 14: mod_base = OTHER; note = 2'-Fluoro-uridine
  modified_base 15: mod_base = um
  modified_base 16: mod_base = OTHER; note = 2'-Fluoro-cytidine
  modified_base 17: mod_base = um
  modified_base 18: mod_base = gm
  modified_base 19: mod_base = gm
  modified_base 20: mod_base = OTHER; note = 2'-Fluoro-adenosine
  modified_base 21: mod_base = OTHER; note = 2'-O-methyl-adenosine
  modified_base 21^22: mod_base = OTHER; note = Phosphorothioate bond
  modified_base 22: mod_base = um
  modified_base 22^23: mod_base = OTHER; note = Phosphorothioate bond
  modified_base 23: mod_base = gm
agcttgatacattttctggaatg

SEQ ID NO: 832 - RNA, 23 nt, synthetic construct
  source 1..23: mol_type = other RNA
  modified_base 1: mod_base = um
  modified_base 1^2: mod_base = OTHER; note = Phosphorothioate bond
  modified_base 2: mod_base = OTHER; note = 2'-Fluoro-uridine
  modified_base 2^3: mod_base = OTHER; note = Phosphorothioate bond
  modified_base 3: mod_base = gm
  modified_base 4: mod_base = OTHER; note = 2'-O-methyl-adenosine
  modified_base 5: mod_base = um
  modified_base 6: mod_base = OTHER; note = 2'-Fluoro-guanosine
  modified_base 7: mod_base = um
  modified_base 8: mod_base = OTHER; note = 2'-Fluoro-adenosine
  modified_base 9: mod_base = OTHER; note = 2'-Fluoro-adenosine
  modified_base 10: mod_base = um
  modified_base 11: mod_base = um
  modified_base 12: mod_base = um
  modified_base 13: mod_base = gm
  modified_base 14: mod_base = OTHER; note = 2'-Fluoro-uridine
  modified_base 15: mod_base = cm
  modified_base 16: mod_base = OTHER; note = 2'-Fluoro-cytidine
  modified_base 17: mod_base = um
  modified_base 18: mod_base = cm
  modified_base 19: mod_base = OTHER; note = 2'-O-methyl-adenosine
  modified_base 20: mod_base = OTHER; note = 2'-Fluoro-uridine
  modified_base 21: mod_base = um
  modified_base 21^22: mod_base = OTHER; note = Phosphorothioate bond
  modified_base 22: mod_base = um
  modified_base 22^23: mod_base = OTHER; note = Phosphorothioate bond
  modified_base 23: mod_base = cm
ttgatgtaatttgtcctcatttc

SEQ ID NO: 833 - RNA, 23 nt, synthetic construct
  source 1..23: mol_type = other RNA
  modified_base 1: mod_base = um
  modified_base 1^2: mod_base = OTHER; note = Phosphorothioate bond
  modified_base 2: mod_base = OTHER; note = 2'-Fluoro-uridine
  modified_base 2^3: mod_base = OTHER; note = Phosphorothioate bond
  modified_base 3: mod_base = um
  modified_base 4: mod_base = um
  modified_base 5: mod_base = gm
  modified_base 6: mod_base = OTHER; note = 2'-Fluoro-cytidine
  modified_base 7: mod_base = um
  modified_base 8: mod_base = OTHER; note = 2'-Fluoro-adenosine
  modified_base 9: mod_base = OTHER; note = 2'-Fluoro-uridine
  modified_base 10: mod_base = um
  modified_base 11: mod_base = um
  modified_base 12: mod_base = cm
  modified_base 13: mod_base = cm
  modified_base 14: mod_base = OTHER; note = 2'-Fluoro-uridine
  modified_base 15: mod_base = cm
  modified_base 16: mod_base = OTHER; note = 2'-Fluoro-cytidine
  modified_base 17: mod_base = um
  modified_base 18: mod_base = OTHER; note = 2'-O-methyl-adenosine
  modified_base 19: mod_base = gm
  modified_base 20: mod_base = OTHER; note = 2'-Fluoro-adenosine
  modified_base 21: mod_base = cm
  modified_base 21^22: mod_base = OTHER; note = Phosphorothioate bond
  modified_base 22: mod_base = OTHER; note = 2'-O-methyl-adenosine
  modified_base 22^23: mod_base = OTHER; note = Phosphorothioate bond
  modified_base 23: mod_base = um
ttttgctatttcctcctagacat

SEQ ID NO: 834 - RNA, 23 nt, synthetic construct
  source 1..23: mol_type = other RNA
  modified_base 1: mod_base = um
  modified_base 1^2: mod_base = OTHER; note = Phosphorothioate bond
  modified_base 2: mod_base = OTHER; note = 2'-Fluoro-guanosine
  modified_base 2^3: mod_base = OTHER; note = Phosphorothioate bond
  modified_base 3: mod_base = OTHER; note = 2'-O-methyl-adenosine
  modified_base 4: mod_base = gm
  modified_base 5: mod_base = um
  modified_base 6: mod_base = OTHER; note = 2'-Fluoro-adenosine
  modified_base 7: mod_base = cm
  modified_base 8: mod_base = OTHER; note = 2'-Fluoro-uridine
  modified_base 9: mod_base = OTHER; note = 2'-Fluoro-guanosine
  modified_base 10: mod_base = um
  modified_base 11: mod_base = um
  modified_base 12: mod_base = gm
  modified_base 13: mod_base = um
  modified_base 14: mod_base = OTHER; note = 2'-Fluoro-uridine
  modified_base 15: mod_base = um
  modified_base 16: mod_base = OTHER; note = 2'-Fluoro-guanosine
  modified_base 17: mod_base = gm
  modified_base 18: mod_base = OTHER; note = 2'-O-methyl-adenosine
  modified_base 19: mod_base = OTHER; note = 2'-O-methyl-adenosine
  modified_base 20: mod_base = OTHER; note = 2'-Fluoro-uridine
  modified_base 21: mod_base = OTHER; note = 2'-O-methyl-adenosine
  modified_base 21^22: mod_base = OTHER; note = Phosphorothioate bond
  modified_base 22: mod_base = gm
  modified_base 22^23: mod_base = OTHER; note = Phosphorothioate bond
  modified_base 23: mod_base = cm
tgagtactgttgtttggaatagc

SEQ ID NO: 835 - RNA, 23 nt, synthetic construct
  source 1..23: mol_type = other RNA
  modified_base 1: mod_base = um
  modified_base 1^2: mod_base = OTHER; note = Phosphorothioate bond
  modified_base 2: mod_base = OTHER; note = 2'-Fluoro-adenosine
  modified_base 2^3: mod_base = OTHER; note = Phosphorothioate bond
  modified_base 3: mod_base = gm
  modified_base 4: mod_base = um
  modified_base 5: mod_base = cm
  modified_base 6: mod_base = OTHER; note = 2'-Fluoro-adenosine
  modified_base 7: mod_base = gm
  modified_base 8: mod_base = OTHER; note = 2'-Fluoro-cytidine
  modified_base 9: mod_base = OTHER; note = 2'-Fluoro-adenosine
  modified_base 10: mod_base = um
  modified_base 11: mod_base = cm
  modified_base 12: mod_base = um
  modified_base 13: mod_base = cm
  modified_base 14: mod_base = OTHER; note = 2'-Fluoro-uridine
  modified_base 15: mod_base = um
  modified_base 16: mod_base = OTHER; note = 2'-Fluoro-adenosine
  modified_base 17: mod_base = cm
  modified_base 18: mod_base = OTHER; note = 2'-O-methyl-adenosine
  modified_base 19: mod_base = gm
  modified_base 20: mod_base = OTHER; note = 2'-Fluoro-adenosine
  modified_base 21: mod_base = OTHER; note = 2'-O-methyl-adenosine
  modified_base 21^22: mod_base = OTHER; note = Phosphorothioate bond
  modified_base 22: mod_base = um
  modified_base 22^23: mod_base = OTHER; note = Phosphorothioate bond
  modified_base 23: mod_base = cm
tagtcagcatctcttacagaatc

SEQ ID NO: 836 - RNA, 23 nt, synthetic construct
  source 1..23: mol_type = other RNA
  modified_base 1: mod_base = um
  modified_base 1^2: mod_base = OTHER; note = Phosphorothioate bond
  modified_base 2: mod_base = OTHER; note = 2'-Fluoro-adenosine
  modified_base 2^3: mod_base = OTHER; note = Phosphorothioate bond
  modified_base 3: mod_base = um
  modified_base 4: mod_base = um
  modified_base 5: mod_base = cm
  modified_base 6: mod_base = OTHER; note = 2'-Fluoro-uridine
  modified_base 7: mod_base = um
  modified_base 8: mod_base = OTHER; note = 2'-Fluoro-cytidine
  modified_base 9: mod_base = OTHER; note = 2'-Fluoro-adenosine
  modified_base 10: mod_base = OTHER; note = 2'-O-methyl-adenosine
  modified_base 11: mod_base = OTHER; note = 2'-O-methyl-adenosine
  modified_base 12: mod_base = gm
  modified_base 13: mod_base = gm
  modified_base 14: mod_base = OTHER; note = 2'-Fluoro-uridine
  modified_base 15: mod_base = gm
  modified_base 16: mod_base = OTHER; note = 2'-Fluoro-adenosine
  modified_base 17: mod_base = gm
  modified_base 18: mod_base = cm
  modified_base 19: mod_base = um
  modified_base 20: mod_base = OTHER; note = 2'-Fluoro-guanosine
  modified_base 21: mod_base = cm
  modified_base 21^22: mod_base = OTHER; note = Phosphorothioate bond
  modified_base 22: mod_base = OTHER; note = 2'-O-methyl-adenosine
  modified_base 22^23: mod_base = OTHER; note = Phosphorothioate bond
  modified_base 23: mod_base = gm
tattcttcaaaggtgagctgcag

SEQ ID NO: 837 - RNA, 23 nt, synthetic construct
  source 1..23: mol_type = other RNA
  modified_base 1: mod_base = OTHER; note = 2'-O-methyl-adenosine
  modified_base 1^2: mod_base = OTHER; note = Phosphorothioate bond
  modified_base 2: mod_base = OTHER; note = 2'-Fluoro-guanosine
  modified_base 2^3: mod_base = OTHER; note = Phosphorothioate bond
  modified_base 3: mod_base = OTHER; note = 2'-O-methyl-adenosine
  modified_base 4: mod_base = gm
  modified_base 5: mod_base = um
  modified_base 6: mod_base = OTHER; note = 2'-Fluoro-cytidine
  modified_base 7: mod_base = OTHER; note = 2'-O-methyl-adenosine
  modified_base 8: mod_base = OTHER; note = 2'-Fluoro-guanosine
  modified_base 9: mod_base = OTHER; note = 2'-Fluoro-adenosine
  modified_base 10: mod_base = cm
  modified_base 11: mod_base = OTHER; note = 2'-O-methyl-adenosine
  modified_base 12: mod_base = um
  modified_base 13: mod_base = OTHER; note = 2'-O-methyl-adenosine
  modified_base 14: mod_base = OTHER; note = 2'-Fluoro-adenosine
  modified_base 15: mod_base = OTHER; note = 2'-O-methyl-adenosine
  modified_base 16: mod_base = OTHER; note = 2'-Fluoro-uridine
  modified_base 17: mod_base = gm
  modified_base 18: mod_base = OTHER; note = 2'-O-methyl-adenosine
  modified_base 19: mod_base = um
  modified_base 20: mod_base = OTHER; note = 2'-Fluoro-cytidine
  modified_base 21: mod_base = um
  modified_base 21^22: mod_base = OTHER; note = Phosphorothioate bond
  modified_base 22: mod_base = cm
  modified_base 22^23: mod_base = OTHER; note = Phosphorothioate bond
  modified_base 23: mod_base = OTHER; note = 2'-O-methyl-adenosine
agagtcagacataaatgatctca

SEQ ID NO: 838 - RNA, 23 nt, synthetic construct
  source 1..23: mol_type = other RNA
  modified_base 1: mod_base = OTHER; note = 2'-O-methyl-adenosine
  modified_base 1^2: mod_base = OTHER; note = Phosphorothioate bond
  modified_base 2: mod_base = OTHER; note = 2'-Fluoro-adenosine
  modified_base 2^3: mod_base = OTHER; note = Phosphorothioate bond
  modified_base 3: mod_base = cm
  modified_base 4: mod_base = cm
  modified_base 5: mod_base = gm
  modified_base 6: mod_base = OTHER; note = 2'-Fluoro-adenosine
  modified_base 7: mod_base = OTHER; note = 2'-O-methyl-adenosine
  modified_base 8: mod_base = OTHER; note = 2'-Fluoro-guanosine
  modified_base 9: mod_base = OTHER; note = 2'-Fluoro-adenosine
  modified_base 10: mod_base = um
  modified_base 11: mod_base = gm
  modified_base 12: mod_base = um
  modified_base 13: mod_base = cm
  modified_base 14: mod_base = OTHER; note = 2'-Fluoro-adenosine
  modified_base 15: mod_base = um
  modified_base 16: mod_base = OTHER; note = 2'-Fluoro-guanosine
  modified_base 17: mod_base = um
  modified_base 18: mod_base = um
  modified_base 19: mod_base = cm
  modified_base 20: mod_base = OTHER; note = 2'-Fluoro-adenosine
  modified_base 21: mod_base = gm
  modified_base 21^22: mod_base = OTHER; note = Phosphorothioate bond
  modified_base 22: mod_base = OTHER; note = 2'-O-methyl-adenosine
  modified_base 22^23: mod_base = OTHER; note = Phosphorothioate bond
  modified_base 23: mod_base = gm
aaccgaagatgtcatgttcagag

SEQ ID NO: 839 - RNA, 23 nt, synthetic construct
  source 1..23: mol_type = other RNA
  modified_base 1: mod_base = OTHER; note = 2'-O-methyl-adenosine
  modified_base 1^2: mod_base = OTHER; note = Phosphorothioate bond
  modified_base 2: mod_base = OTHER; note = 2'-Fluoro-uridine
  modified_base 2^3: mod_base = OTHER; note = Phosphorothioate bond
  modified_base 3: mod_base = gm
  modified_base 4: mod_base = cm
  modified_base 5: mod_base = um
  modified_base 6: mod_base = OTHER; note = 2'-Fluoro-adenosine
  modified_base 7: mod_base = cm
  modified_base 8: mod_base = OTHER; note = 2'-Fluoro-uridine
  modified_base 9: mod_base = OTHER; note = 2'-Fluoro-uridine
  modified_base 10: mod_base = OTHER; note = 2'-O-methyl-adenosine
  modified_base 11: mod_base = OTHER; note = 2'-O-methyl-adenosine
  modified_base 12: mod_base = cm
  modified_base 13: mod_base = gm
  modified_base 14: mod_base = OTHER; note = 2'-Fluoro-guanosine
  modified_base 15: mod_base = OTHER; note = 2'-O-methyl-adenosine
  modified_base 16: mod_base = OTHER; note = 2'-Fluoro-cytidine
  modified_base 17: mod_base = um
  modified_base 18: mod_base = um
  modified_base 19: mod_base = gm
  modified_base 20: mod_base = OTHER; note = 2'-Fluoro-adenosine
  modified_base 21: mod_base = gm
  modified_base 21^22: mod_base = OTHER; note = Phosphorothioate bond
  modified_base 22: mod_base = OTHER; note = 2'-O-methyl-adenosine
  modified_base 22^23: mod_base = OTHER; note = Phosphorothioate bond
  modified_base 23: mod_base = gm
atgctacttaacggacttgagag

SEQ ID NO: 840 - RNA, 23 nt, synthetic construct
  source 1..23: mol_type = other RNA
  modified_base 1: mod_base = OTHER; note = 2'-O-methyl-adenosine
  modified_base 1^2: mod_base = OTHER; note = Phosphorothioate bond
  modified_base 2: mod_base = OTHER; note = 2'-Fluoro-cytidine
  modified_base 2^3: mod_base = OTHER; note = Phosphorothioate bond
  modified_base 3: mod_base = OTHER; note = 2'-O-methyl-adenosine
  modified_base 4: mod_base = gm
  modified_base 5: mod_base = OTHER; note = 2'-O-methyl-adenosine
  modified_base 6: mod_base = OTHER; note = 2'-Fluoro-uridine
  modified_base 7: mod_base = OTHER; note = 2'-O-methyl-adenosine
  modified_base 8: mod_base = OTHER; note = 2'-Fluoro-guanosine
  modified_base 9: mod_base = OTHER; note = 2'-Fluoro-adenosine
  modified_base 10: mod_base = um
  modified_base 11: mod_base = cm
  modified_base 12: mod_base = cm
  modified_base 13: mod_base = cm
  modified_base 14: mod_base = OTHER; note = 2'-Fluoro-adenosine
  modified_base 15: mod_base = cm
  modified_base 16: mod_base = OTHER; note = 2'-Fluoro-adenosine
  modified_base 17: mod_base = gm
  modified_base 18: mod_base = um
  modified_base 19: mod_base = OTHER; note = 2'-O-methyl-adenosine
  modified_base 20: mod_base = OTHER; note = 2'-Fluoro-cytidine
  modified_base 21: mod_base = um
  modified_base 21^22: mod_base = OTHER; note = Phosphorothioate bond
  modified_base 22: mod_base = gm
  modified_base 22^23: mod_base = OTHER; note = Phosphorothioate bond
  modified_base 23: mod_base = gm
acagatagatcccacagtactgg

SEQ ID NO: 841 - RNA, 23 nt, synthetic construct
  source 1..23: mol_type = other RNA
  modified_base 1: mod_base = OTHER; note = 2'-O-methyl-adenosine
  modified_base 1^2: mod_base = OTHER; note = Phosphorothioate bond
  modified_base 2: mod_base = OTHER; note = 2'-Fluoro-cytidine
  modified_base 2^3: mod_base = OTHER; note = Phosphorothioate bond
  modified_base 3: mod_base = OTHER; note = 2'-O-methyl-adenosine
  modified_base 4: mod_base = cm
  modified_base 5: mod_base = um
  modified_base 6: mod_base = OTHER; note = 2'-Fluoro-uridine
  modified_base 7: mod_base = cm
  modified_base 8: mod_base = OTHER; note = 2'-Fluoro-guanosine
  modified_base 9: mod_base = OTHER; note = 2'-Fluoro-uridine
  modified_base 10: mod_base = OTHER; note = 2'-O-methyl-adenosine
  modified_base 11: mod_base = OTHER; note = 2'-O-methyl-adenosine
  modified_base 12: mod_base = OTHER; note = 2'-O-methyl-adenosine
  modified_base 13: mod_base = gm
  modified_base 14: mod_base = OTHER; note = 2'-Fluoro-uridine
  modified_base 15: mod_base = OTHER; note = 2'-O-methyl-adenosine
  modified_base 16: mod_base = OTHER; note = 2'-Fluoro-guanosine
  modified_base 17: mod_base = OTHER; note = 2'-O-methyl-adenosine
  modified_base 18: mod_base = gm
  modified_base 19: mod_base = cm
  modified_base 20: mod_base = OTHER; note = 2'-Fluoro-uridine
  modified_base 21: mod_base = um
  modified_base 21^22: mod_base = OTHER; note = Phosphorothioate bond
  modified_base 22: mod_base = gm
  modified_base 22^23: mod_base = OTHER; note = Phosphorothioate bond
  modified_base 23: mod_base = OTHER; note = 2'-O-methyl-adenosine
acacttcgtaaagtagagcttga

SEQ ID NO: 842 - RNA, 23 nt, synthetic construct
  source 1..23: mol_type = other RNA
  modified_base 1: mod_base = cm
  modified_base 1^2: mod_base = OTHER; note = Phosphorothioate bond
  modified_base 2: mod_base = OTHER; note = 2'-Fluoro-uridine
  modified_base 2^3: mod_base = OTHER; note = Phosphorothioate bond
  modified_base 3: mod_base = um
  modified_base 4: mod_base = OTHER; note = 2'-O-methyl-adenosine
  modified_base 5: mod_base = gm
  modified_base 6: mod_base = OTHER; note = 2'-Fluoro-adenosine
  modified_base 7: mod_base = um
  modified_base 8: mod_base = OTHER; note = 2'-Fluoro-uridine
  modified_base 9: mod_base = OTHER; note = 2'-Fluoro-cytidine
  modified_base 10: mod_base = cm
  modified_base 11: mod_base = OTHER; note = 2'-O-methyl-adenosine
  modified_base 12: mod_base = gm
  modified_base 13: mod_base = cm
  modified_base 14: mod_base = OTHER; note = 2'-Fluoro-uridine
  modified_base 15: mod_base = cm
  modified_base 16: mod_base = OTHER; note = 2'-Fluoro-adenosine
  modified_base 17: mod_base = gm
  modified_base 18: mod_base = um
  modified_base 19: mod_base = um
  modified_base 20: mod_base = OTHER; note = 2'-Fluoro-uridine
  modified_base 21: mod_base = um
  modified_base 21^22: mod_base = OTHER; note = Phosphorothioate bond
  modified_base 22: mod_base = OTHER; note = 2'-O-methyl-adenosine
  modified_base 22^23: mod_base = OTHER; note = Phosphorothioate bond
  modified_base 23: mod_base = OTHER; note = 2'-O-methyl-adenosine
cttagattccagctcagttttaa

SEQ ID NO: 843 - RNA, 23 nt, synthetic construct
  source 1..23: mol_type = other RNA
  modified_base 1: mod_base = gm
  modified_base 1^2: mod_base = OTHER; note = Phosphorothioate bond
  modified_base 2: mod_base = OTHER; note = 2'-Fluoro-adenosine
  modified_base 2^3: mod_base = OTHER; note = Phosphorothioate bond
  modified_base 3: mod_base = um
  modified_base 4: mod_base = um
  modified_base 5: mod_base = cm
  modified_base 6: mod_base = OTHER; note = 2'-Fluoro-uridine
  modified_base 7: mod_base = um
  modified_base 8: mod_base = OTHER; note = 2'-Fluoro-guanosine
  modified_base 9: mod_base = OTHER; note = 2'-Fluoro-cytidine
  modified_base 10: mod_base = um
  modified_base 11: mod_base = um
  modified_base 12: mod_base = um
  modified_base 13: mod_base = OTHER; note = 2'-O-methyl-adenosine
  modified_base 14: mod_base = OTHER; note = 2'-Fluoro-uridine
  modified_base 15: mod_base = um
  modified_base 16: mod_base = OTHER; note = 2'-Fluoro-guanosine
  modified_base 17: mod_base = gm
  modified_base 18: mod_base = um
  modified_base 19: mod_base = OTHER; note = 2'-O-methyl-adenosine
  modified_base 20: mod_base = OTHER; note = 2'-Fluoro-cytidine
  modified_base 21: mod_base = um
  modified_base 21^22: mod_base = OTHER; note = Phosphorothioate bond
  modified_base 22: mod_base = gm
  modified_base 22^23: mod_base = OTHER; note = Phosphorothioate bond
  modified_base 23: mod_base = OTHER; note = 2'-O-methyl-adenosine
gattcttgctttattggtactga

SEQ ID NO: 844 - RNA, 23 nt, synthetic construct
  source 1..23: mol_type = other RNA
  modified_base 1: mod_base = um
  modified_base 1^2: mod_base = OTHER; note = Phosphorothioate bond
  modified_base 2: mod_base = OTHER; note = 2'-Fluoro-uridine
  modified_base 2^3: mod_base = OTHER; note = Phosphorothioate bond
  modified_base 3: mod_base = um
  modified_base 4: mod_base = um
  modified_base 5: mod_base = cm
  modified_base 6: mod_base = OTHER; note = 2'-Fluoro-uridine
  modified_base 7: mod_base = gm
  modified_base 8: mod_base = OTHER; note = 2'-Fluoro-guanosine
  modified_base 9: mod_base = OTHER; note = 2'-Fluoro-adenosine
  modified_base 10: mod_base = OTHER; note = 2'-O-methyl-adenosine
  modified_base 11: mod_base = um
  modified_base 12: mod_base = gm
  modified_base 13: mod_base = um
  modified_base 14: mod_base = OTHER; note = 2'-Fluoro-adenosine
  modified_base 15: mod_base = um
  modified_base 16: mod_base = OTHER; note = 2'-Fluoro-uridine
  modified_base 17: mod_base = cm
  modified_base 18: mod_base = um
  modified_base 19: mod_base = OTHER; note = 2'-O-methyl-adenosine
  modified_base 20: mod_base = OTHER; note = 2'-Fluoro-adenosine
  modified_base 21: mod_base = gm
  modified_base 21^22: mod_base = OTHER; note = Phosphorothioate bond
  modified_base 22: mod_base = OTHER; note = 2'-O-methyl-adenosine
  modified_base 22^23: mod_base = OTHER; note = Phosphorothioate bond
  modified_base 23: mod_base = cm
ttttctggaatgtattctaagac

SEQ ID NO: 845 - RNA, 23 nt, synthetic construct
  source 1..23: mol_type = other RNA
  modified_base 1: mod_base = um
  modified_base 1^2: mod_base = OTHER; note = Phosphorothioate bond
  modified_base 2: mod_base = OTHER; note = 2'-Fluoro-uridine
  modified_base 2^3: mod_base = OTHER; note = Phosphorothioate bond
  modified_base 3: mod_base = OTHER; note = 2'-O-methyl-adenosine
  modified_base 4: mod_base = um
  modified_base 5: mod_base = cm
  modified_base 6: mod_base = OTHER; note = 2'-Fluoro-adenosine
  modified_base 7: mod_base = OTHER; note = 2'-O-methyl-adenosine
  modified_base 8: mod_base = OTHER; note = 2'-Fluoro-uridine
  modified_base 9: mod_base = OTHER; note = 2'-Fluoro-guanosine
  modified_base 10: mod_base = OTHER; note = 2'-O-methyl-adenosine
  modified_base 11: mod_base = um
  modified_base 12: mod_base = gm
  modified_base 13: mod_base = cm
  modified_base 14: mod_base = OTHER; note = 2'-Fluoro-adenosine
  modified_base 15: mod_base = OTHER; note = 2'-O-methyl-adenosine
  modified_base 16: mod_base = OTHER; note = 2'-Fluoro-uridine
  modified_base 17: mod_base = cm
  modified_base 18: mod_base = OTHER; note = 2'-O-methyl-adenosine
  modified_base 19: mod_base = um
  modified_base 20: mod_base = OTHER; note = 2'-Fluoro-uridine
  modified_base 21: mod_base = um
  modified_base 21^22: mod_base = OTHER; note = Phosphorothioate bond
  modified_base 22: mod_base = cm
  modified_base 22^23: mod_base = OTHER; note = Phosphorothioate bond
  modified_base 23: mod_base = um
ttatcaatgatgcaatcatttct

SEQ ID NO: 846 - RNA, 23 nt, synthetic construct
  source 1..23: mol_type = other RNA
  modified_base 1: mod_base = um
  modified_base 1^2: mod_base = OTHER; note = Phosphorothioate bond
  modified_base 2: mod_base = OTHER; note = 2'-Fluoro-cytidine
  modified_base 2^3: mod_base = OTHER; note = Phosphorothioate bond
  modified_base 3: mod_base = cm
  modified_base 4: mod_base = um
  modified_base 5: mod_base = um
  modified_base 6: mod_base = OTHER; note = 2'-Fluoro-uridine
  modified_base 7: mod_base = gm
  modified_base 8: mod_base = OTHER; note = 2'-Fluoro-uridine
  modified_base 9: mod_base = OTHER; note = 2'-Fluoro-adenosine
  modified_base 10: mod_base = OTHER; note = 2'-O-methyl-adenosine
  modified_base 11: mod_base = OTHER; note = 2'-O-methyl-adenosine
  modified_base 12: mod_base = OTHER; note = 2'-O-methyl-adenosine
  modified_base 13: mod_base = um
  modified_base 14: mod_base = OTHER; note = 2'-Fluoro-uridine
  modified_base 15: mod_base = um
  modified_base 16: mod_base = OTHER; note = 2'-Fluoro-cytidine
  modified_base 17: mod_base = OTHER; note = 2'-O-methyl-adenosine
  modified_base 18: mod_base = cm
  modified_base 19: mod_base = cm
  modified_base 20: mod_base = OTHER; note = 2'-Fluoro-adenosine
  modified_base 21: mod_base = gm
  modified_base 21^22: mod_base = OTHER; note = Phosphorothioate bond
  modified_base 22: mod_base = cm
  modified_base 22^23: mod_base = OTHER; note = Phosphorothioate bond
  modified_base 23: mod_base = um
tcctttgtaaaatttcaccagct

SEQ ID NO: 847 - RNA, 23 nt, synthetic construct
  source 1..23: mol_type = other RNA
  modified_base 1: mod_base = um
  modified_base 1^2: mod_base = OTHER; note = Phosphorothioate bond
  modified_base 2: mod_base = OTHER; note = 2'-Fluoro-uridine
  modified_base 2^3: mod_base = OTHER; note = Phosphorothioate bond
  modified_base 3: mod_base = um
  modified_base 4: mod_base = gm
  modified_base 5: mod_base = OTHER; note = 2'-O-methyl-adenosine
  modified_base 6: mod_base = OTHER; note = 2'-Fluoro-uridine
  modified_base 7: mod_base = gm
  modified_base 8: mod_base = OTHER; note = 2'-Fluoro-uridine
  modified_base 9: mod_base = OTHER; note = 2'-Fluoro-adenosine
  modified_base 10: mod_base = OTHER; note = 2'-O-methyl-adenosine
  modified_base 11: mod_base = um
  modified_base 12: mod_base = um
  modified_base 13: mod_base = um
  modified_base 14: mod_base = OTHER; note = 2'-Fluoro-guanosine
  modified_base 15: mod_base = um
  modified_base 16: mod_base = OTHER; note = 2'-Fluoro-cytidine
  modified_base 17: mod_base = cm
  modified_base 18: mod_base = um
  modified_base 19: mod_base = cm
  modified_base 20: mod_base = OTHER; note = 2'-Fluoro-adenosine
  modified_base 21: mod_base = um
  modified_base 21^22: mod_base = OTHER; note = Phosphorothioate bond
  modified_base 22: mod_base = um
  modified_base 22^23: mod_base = OTHER; note = Phosphorothioate bond
  modified_base 23: mod_base = um
tttgatgtaatttgtcctcattt

SEQ ID NO: 848 - RNA, 23 nt, synthetic construct
  source 1..23: mol_type = other RNA
  modified_base 1: mod_base = gm
  modified_base 1^2: mod_base = OTHER; note = Phosphorothioate bond
  modified_base 2: mod_base = OTHER; note = 2'-Fluoro-uridine
  modified_base 2^3: mod_base = OTHER; note = Phosphorothioate bond
  modified_base 3: mod_base = um
  modified_base 4: mod_base = gm
  modified_base 5: mod_base = um
  modified_base 6: mod_base = OTHER; note = 2'-Fluoro-uridine
  modified_base 7: mod_base = um
  modified_base 8: mod_base = OTHER; note = 2'-Fluoro-guanosine
  modified_base 9: mod_base = OTHER; note = 2'-Fluoro-guanosine
  modified_base 10: mod_base = OTHER; note = 2'-O-methyl-adenosine
  modified_base 11: mod_base = OTHER; note = 2'-O-methyl-adenosine
  modified_base 12: mod_base = um
  modified_base 13: mod_base = OTHER; note = 2'-O-methyl-adenosine
  modified_base 14: mod_base = OTHER; note = 2'-Fluoro-guanosine
  modified_base 15: mod_base = cm
  modified_base 16: mod_base = OTHER; note = 2'-Fluoro-adenosine
  modified_base 17: mod_base = cm
  modified_base 18: mod_base = cm
  modified_base 19: mod_base = gm
  modified_base 20: mod_base = OTHER; note = 2'-Fluoro-guanosine
  modified_base 21: mod_base = OTHER; note = 2'-O-methyl-adenosine
  modified_base 21^22: mod_base = OTHER; note = Phosphorothioate bond
  modified_base 22: mod_base = OTHER; note = 2'-O-methyl-adenosine
  modified_base 22^23: mod_base = OTHER; note = Phosphorothioate bond
  modified_base 23: mod_base = OTHER; note = 2'-O-methyl-adenosine
gttgtttggaatagcaccggaaa

SEQ ID NO: 849 - RNA, 23 nt, synthetic construct
  source 1..23: mol_type = other RNA
  modified_base 1: mod_base = um
  modified_base 1^2: mod_base = OTHER; note = Phosphorothioate bond
  modified_base 2: mod_base = OTHER; note = 2'-Fluoro-guanosine
  modified_base 2^3: mod_base = OTHER; note = Phosphorothioate bond
  modified_base 3: mod_base = gm
  modified_base 4: mod_base = OTHER; note = 2'-O-methyl-adenosine
  modified_base 5: mod_base = OTHER; note = 2'-O-methyl-adenosine
  modified_base 6: mod_base = OTHER; note = 2'-Fluoro-adenosine
  modified_base 7: mod_base = cm
  modified_base 8: mod_base = OTHER; note = 2'-Fluoro-adenosine
  modified_base 9: mod_base = OTHER; note = 2'-Fluoro-guanosine
  modified_base 10: mod_base = OTHER; note = 2'-O-methyl-adenosine
  modified_base 11: mod_base = gm
  modified_base 12: mod_base = cm
  modified_base 13: mod_base = OTHER; note = 2'-O-methyl-adenosine
  modified_base 14: mod_base = OTHER; note = 2'-Fluoro-cytidine
  modified_base 15: mod_base = cm
  modified_base 16: mod_base = OTHER; note = 2'-Fluoro-uridine
  modified_base 17: mod_base = um
  modified_base 18: mod_base = gm
  modified_base 19: mod_base = OTHER; note = 2'-O-methyl-adenosine
  modified_base 20: mod_base = OTHER; note = 2'-Fluoro-guanosine
  modified_base 21: mod_base = um
  modified_base 21^22: mod_base = OTHER; note = Phosphorothioate bond
  modified_base 22: mod_base = um
  modified_base 22^23: mod_base = OTHER; note = Phosphorothioate bond
  modified_base 23: mod_base = gm
tggaaacagagcaccttgagttg

SEQ ID NO: 850 - RNA, 23 nt, synthetic construct
  source 1..23: mol_type = other RNA
  modified_base 1: mod_base = cm
  modified_base 1^2: mod_base = OTHER; note = Phosphorothioate bond
  modified_base 2: mod_base = OTHER; note = 2'-Fluoro-adenosine
  modified_base 2^3: mod_base = OTHER; note = Phosphorothioate bond
  modified_base 3: mod_base = OTHER; note = 2'-O-methyl-adenosine
  modified_base 4: mod_base = um
  modified_base 5: mod_base = gm
  modified_base 6: mod_base = OTHER; note = 2'-Fluoro-adenosine
  modified_base 7: mod_base = um
  modified_base 8: mod_base = OTHER; note = 2'-Fluoro-guanosine
  modified_base 9: mod_base = OTHER; note = 2'-Fluoro-cytidine
  modified_base 10: mod_base = OTHER; note = 2'-O-methyl-adenosine
  modified_base 11: mod_base = OTHER; note = 2'-O-methyl-adenosine
  modified_base 12: mod_base = um
  modified_base 13: mod_base = cm
  modified_base 14: mod_base = OTHER; note = 2'-Fluoro-adenosine
  modified_base 15: mod_base = um
  modified_base 16: mod_base = OTHER; note = 2'-Fluoro-uridine
  modified_base 17: mod_base = um
  modified_base 18: mod_base = cm
  modified_base 19: mod_base = um
  modified_base 20: mod_base = OTHER; note = 2'-Fluoro-uridine
  modified_base 21: mod_base = cm
  modified_base 21^22: mod_base = OTHER; note = Phosphorothioate bond
  modified_base 22: mod_base = cm
  modified_base 22^23: mod_base = OTHER; note = Phosphorothioate bond
  modified_base 23: mod_base = OTHER; note = 2'-O-methyl-adenosine
caatgatgcaatcatttcttcca

SEQ ID NO: 851 - RNA, 23 nt, synthetic construct
  source 1..23: mol_type = other RNA
  modified_base 1: mod_base = OTHER; note = 2'-O-methyl-adenosine
  modified_base 1^2: mod_base = OTHER; note = Phosphorothioate bond
  modified_base 2: mod_base = OTHER; note = 2'-Fluoro-adenosine
  modified_base 2^3: mod_base = OTHER; note = Phosphorothioate bond
  modified_base 3: mod_base = um
  modified_base 4: mod_base = gm
  modified_base 5: mod_base = cm
  modified_base 6: mod_base = OTHER; note = 2'-Fluoro-uridine
  modified_base 7: mod_base = um
  modified_base 8: mod_base = OTHER; note = 2'-Fluoro-guanosine
  modified_base 9: mod_base = OTHER; note = 2'-Fluoro-guanosine
  modified_base 10: mod_base = um
  modified_base 11: mod_base = um
  modified_base 12: mod_base = gm
  modified_base 13: mod_base = OTHER; note = 2'-O-methyl-adenosine
  modified_base 14: mod_base = OTHER; note = 2'-Fluoro-uridine
  modified_base 15: mod_base = um
  modified_base 16: mod_base = OTHER; note = 2'-Fluoro-cytidine
  modified_base 17: mod_base = um
  modified_base 18: mod_base = um
  modified_base 19: mod_base = gm
  modified_base 20: mod_base = OTHER; note = 2'-Fluoro-cytidine
  modified_base 21: mod_base = um
  modified_base 21^22: mod_base = OTHER; note = Phosphorothioate bond
  modified_base 22: mod_base = um
  modified_base 22^23: mod_base = OTHER; note = Phosphorothioate bond
  modified_base 23: mod_base = um
aatgcttggttgattcttgcttt

SEQ ID NO: 852 - RNA, 23 nt, synthetic construct
  source 1..23: mol_type = other RNA
  modified_base 1: mod_base = OTHER; note = 2'-O-methyl-adenosine
  modified_base 1^2: mod_base = OTHER; note = Phosphorothioate bond
  modified_base 2: mod_base = OTHER; note = 2'-Fluoro-adenosine
  modified_base 2^3: mod_base = OTHER; note = Phosphorothioate bond
  modified_base 3: mod_base = OTHER; note = 2'-O-methyl-adenosine
  modified_base 4: mod_base = gm
  modified_base 5: mod_base = um
  modified_base 6: mod_base = OTHER; note = 2'-Fluoro-uridine
  modified_base 7: mod_base = cm
  modified_base 8: mod_base = OTHER; note = 2'-Fluoro-cytidine
  modified_base 9: mod_base = OTHER; note = 2'-Fluoro-uridine
  modified_base 10: mod_base = um
  modified_base 11: mod_base = OTHER; note = 2'-O-methyl-adenosine
  modified_base 12: mod_base = gm
  modified_base 13: mod_base = OTHER; note = 2'-O-methyl-adenosine
  modified_base 14: mod_base = OTHER; note = 2'-Fluoro-uridine
  modified_base 15: mod_base = um
  modified_base 16: mod_base = OTHER; note = 2'-Fluoro-cytidine
  modified_base 17: mod_base = cm
  modified_base 18: mod_base = OTHER; note = 2'-O-methyl-adenosine
  modified_base 19: mod_base = gm
  modified_base 20: mod_base = OTHER; note = 2'-Fluoro-cytidine
  modified_base 21: mod_base = um
  modified_base 21^22: mod_base = OTHER; note = Phosphorothioate bond
  modified_base 22: mod_base = cm
  modified_base 22^23: mod_base = OTHER; note = Phosphorothioate bond
  modified_base 23: mod_base = OTHER; note = 2'-O-methyl-adenosine
aaagttccttagattccagctca

SEQ ID NO: 853 - RNA, 23 nt, synthetic construct
  source 1..23: mol_type = other RNA
  modified_base 1: mod_base = um
  modified_base 1^2: mod_base = OTHER; note = Phosphorothioate bond
  modified_base 2: mod_base = OTHER; note = 2'-Fluoro-guanosine
  modified_base 2^3: mod_base = OTHER; note = Phosphorothioate bond
  modified_base 3: mod_base = um
  modified_base 4: mod_base = OTHER; note = 2'-O-methyl-adenosine
  modified_base 5: mod_base = cm
  modified_base 6: mod_base = OTHER; note = 2'-Fluoro-uridine
  modified_base 7: mod_base = gm
  modified_base 8: mod_base = OTHER; note = 2'-Fluoro-guanosine
  modified_base 9: mod_base = OTHER; note = 2'-Fluoro-adenosine
  modified_base 10: mod_base = cm
  modified_base 11: mod_base = OTHER; note = 2'-O-methyl-adenosine
  modified_base 12: mod_base = OTHER; note = 2'-O-methyl-adenosine
  modified_base 13: mod_base = um
  modified_base 14: mod_base = OTHER; note = 2'-Fluoro-adenosine
  modified_base 15: mod_base = um
  modified_base 16: mod_base = OTHER; note = 2'-Fluoro-uridine
  modified_base 17: mod_base = OTHER; note = 2'-O-methyl-adenosine
  modified_base 18: mod_base = OTHER; note = 2'-O-methyl-adenosine
  modified_base 19: mod_base = gm
  modified_base 20: mod_base = OTHER; note = 2'-Fluoro-cytidine
  modified_base 21: mod_base = um
  modified_base 21^22: mod_base = OTHER; note = Phosphorothioate bond
  modified_base 22: mod_base = gm
  modified_base 22^23: mod_base = OTHER; note = Phosphorothioate bond
  modified_base 23: mod_base = gm
tgtactggacaatattaagctgg

SEQ ID NO: 854 - RNA, 23 nt, synthetic construct
  source 1..23: mol_type = other RNA
  modified_base 1: mod_base = OTHER; note = 2'-O-methyl-adenosine
  modified_base 1^2: mod_base = OTHER; note = Phosphorothioate bond
  modified_base 2: mod_base = OTHER; note = 2'-Fluoro-guanosine
  modified_base 2^3: mod_base = OTHER; note = Phosphorothioate bond
  modified_base 3: mod_base = OTHER; note = 2'-O-methyl-adenosine
  modified_base 4: mod_base = OTHER; note = 2'-O-methyl-adenosine
  modified_base 5: mod_base = um
  modified_base 6: mod_base = OTHER; note = 2'-Fluoro-cytidine
  modified_base 7: mod_base = cm
  modified_base 8: mod_base = OTHER; note = 2'-Fluoro-adenosine
  modified_base 9: mod_base = OTHER; note = 2'-Fluoro-uridine
  modified_base 10: mod_base = OTHER; note = 2'-O-methyl-adenosine
  modified_base 11: mod_base = um
  modified_base 12: mod_base = OTHER; note = 2'-O-methyl-adenosine
  modified_base 13: mod_base = um
  modified_base 14: mod_base = OTHER; note = 2'-Fluoro-adenosine
  modified_base 15: mod_base = OTHER; note = 2'-O-methyl-adenosine
  modified_base 16: mod_base = OTHER; note = 2'-Fluoro-adenosine
  modified_base 17: mod_base = cm
  modified_base 18: mod_base = cm
  modified_base 19: mod_base = cm
  modified_base 20: mod_base = OTHER; note = 2'-Fluoro-adenosine
  modified_base 21: mod_base = um
  modified_base 21^22: mod_base = OTHER; note = Phosphorothioate bond
  modified_base 22: mod_base = gm
  modified_base 22^23: mod_base = OTHER; note = Phosphorothioate bond
  modified_base 23: mod_base = gm
agaatccatatataaacccatgg

SEQ ID NO: 855 - RNA, 23 nt, synthetic construct
  source 1..23: mol_type = other RNA
  modified_base 1: mod_base = um
  modified_base 1^2: mod_base = OTHER; note = Phosphorothioate bond
  modified_base 2: mod_base = OTHER; note = 2'-Fluoro-uridine
  modified_base 2^3: mod_base = OTHER; note = Phosphorothioate bond
  modified_base 3: mod_base = um
  modified_base 4: mod_base = um
  modified_base 5: mod_base = OTHER; note = 2'-O-methyl-adenosine
  modified_base 6: mod_base = OTHER; note = 2'-Fluoro-uridine
  modified_base 7: mod_base = gm
  modified_base 8: mod_base = OTHER; note = 2'-Fluoro-uridine
  modified_base 9: mod_base = OTHER; note = 2'-Fluoro-adenosine
  modified_base 10: mod_base = cm
  modified_base 11: mod_base = um
  modified_base 12: mod_base = gm
  modified_base 13: mod_base = gm
  modified_base 14: mod_base = OTHER; note = 2'-Fluoro-adenosine
  modified_base 15: mod_base = cm
  modified_base 16: mod_base = OTHER; note = 2'-Fluoro-adenosine
  modified_base 17: mod_base = OTHER; note = 2'-O-methyl-adenosine
  modified_base 18: mod_base = um
  modified_base 19: mod_base = OTHER; note = 2'-O-methyl-adenosine
  modified_base 20: mod_base = OTHER; note = 2'-Fluoro-uridine
  modified_base 21: mod_base = um
  modified_base 21^22: mod_base = OTHER; note = Phosphorothioate bond
  modified_base 22: mod_base = OTHER; note = 2'-O-methyl-adenosine
  modified_base 22^23: mod_base = OTHER; note = Phosphorothioate bond
  modified_base 23: mod_base = OTHER; note = 2'-O-methyl-adenosine
ttttatgtactggacaatattaa

SEQ ID NO: 856 - RNA, 23 nt, synthetic construct
  source 1..23: mol_type = other RNA
  modified_base 1: mod_base = um
  modified_base 1^2: mod_base = OTHER; note = Phosphorothioate bond
  modified_base 2: mod_base = OTHER; note = 2'-Fluoro-uridine
  modified_base 2^3: mod_base = OTHER; note = Phosphorothioate bond
  modified_base 3: mod_base = gm
  modified_base 4: mod_base = OTHER; note = 2'-O-methyl-adenosine
  modified_base 5: mod_base = um
  modified_base 6: mod_base = OTHER; note = 2'-Fluoro-adenosine
  modified_base 7: mod_base = cm
  modified_base 8: mod_base = OTHER; note = 2'-Fluoro-adenosine
  modified_base 9: mod_base = OTHER; note = 2'-Fluoro-uridine
  modified_base 10: mod_base = um
  modified_base 11: mod_base = um
  modified_base 12: mod_base = um
  modified_base 13: mod_base = cm
  modified_base 14: mod_base = OTHER; note = 2'-Fluoro-uridine
  modified_base 15: mod_base = gm
  modified_base 16: mod_base = OTHER; note = 2'-Fluoro-guanosine
  modified_base 17: mod_base = OTHER; note = 2'-O-methyl-adenosine
  modified_base 18: mod_base = OTHER; note = 2'-O-methyl-adenosine
  modified_base 19: mod_base = um
  modified_base 20: mod_base = OTHER; note = 2'-Fluoro-guanosine
  modified_base 21: mod_base = um
  modified_base 21^22: mod_base = OTHER; note = Phosphorothioate bond
  modified_base 22: mod_base = OTHER; note = 2'-O-methyl-adenosine
  modified_base 22^23: mod_base = OTHER; note = Phosphorothioate bond
  modified_base 23: mod_base = um
ttgatacattttctggaatgtat

SEQ ID NO: 857 - RNA, 23 nt, synthetic construct
  source 1..23: mol_type = other RNA
  modified_base 1: mod_base = OTHER; note = 2'-O-methyl-adenosine
  modified_base 1^2: mod_base = OTHER; note = Phosphorothioate bond
  modified_base 2: mod_base = OTHER; note = 2'-Fluoro-adenosine
  modified_base 2^3: mod_base = OTHER; note = Phosphorothioate bond
  modified_base 3: mod_base = cm
  modified_base 4: mod_base = gm
  modified_base 5: mod_base = gm
  modified_base 6: mod_base = OTHER; note = 2'-Fluoro-adenosine
  modified_base 7: mod_base = cm
  modified_base 8: mod_base = OTHER; note = 2'-Fluoro-uridine
  modified_base 9: mod_base = OTHER; note = 2'-Fluoro-uridine
  modified_base 10: mod_base = gm
  modified_base 11: mod_base = OTHER; note = 2'-O-methyl-adenosine
  modified_base 12: mod_base = gm
  modified_base 13: mod_base = OTHER; note = 2'-O-methyl-adenosine
  modified_base 14: mod_base = OTHER; note = 2'-Fluoro-guanosine
  modified_base 15: mod_base = OTHER; note = 2'-O-methyl-adenosine
  modified_base 16: mod_base = OTHER; note = 2'-Fluoro-guanosine
  modified_base 17: mod_base = gm
  modified_base 18: mod_base = OTHER; note = 2'-O-methyl-adenosine
  modified_base 19: mod_base = gm
  modified_base 20: mod_base = OTHER; note = 2'-Fluoro-adenosine
  modified_base 21: mod_base = gm
  modified_base 21^22: mod_base = OTHER; note = Phosphorothioate bond
  modified_base 22: mod_base = cm
  modified_base 22^23: mod_base = OTHER; note = Phosphorothioate bond
  modified_base 23: mod_base = cm
aacggacttgagagaggagagcc

SEQ ID NO: 858 - RNA, 23 nt, synthetic construct
  source 1..23: mol_type = other RNA
  modified_base 1: mod_base = um
  modified_base 1^2: mod_base = OTHER; note = Phosphorothioate bond
  modified_base 2: mod_base = OTHER; note = 2'-Fluoro-cytidine
  modified_base 2^3: mod_base = OTHER; note = Phosphorothioate bond
  modified_base 3: mod_base = cm
  modified_base 4: mod_base = um
  modified_base 5: mod_base = um
  modified_base 6: mod_base = OTHER; note = 2'-Fluoro-uridine
  modified_base 7: mod_base = gm
  modified_base 8: mod_base = OTHER; note = 2'-Fluoro-guanosine
  modified_base 9: mod_base = OTHER; note = 2'-Fluoro-adenosine
  modified_base 10: mod_base = OTHER; note = 2'-O-methyl-adenosine
  modified_base 11: mod_base = um
  modified_base 12: mod_base = um
  modified_base 13: mod_base = gm
  modified_base 14: mod_base = OTHER; note = 2'-Fluoro-uridine
  modified_base 15: mod_base = gm
  modified_base 16: mod_base = OTHER; note = 2'-Fluoro-cytidine
  modified_base 17: mod_base = um
  modified_base 18: mod_base = um
  modified_base 19: mod_base = OTHER; note = 2'-O-methyl-adenosine
  modified_base 20: mod_base = OTHER; note = 2'-Fluoro-guanosine
  modified_base 21: mod_base = um
  modified_base 21^22: mod_base = OTHER; note = Phosphorothioate bond
  modified_base 22: mod_base = OTHER; note = 2'-O-methyl-adenosine
  modified_base 22^23: mod_base = OTHER; note = Phosphorothioate bond
  modified_base 23: mod_base = gm
tcctttggaattgtgcttagtag

SEQ ID NO: 859 - RNA, 23 nt, synthetic construct
  source 1..23: mol_type = other RNA
  modified_base 1: mod_base = OTHER; note = 2'-O-methyl-adenosine
  modified_base 1^2: mod_base = OTHER; note = Phosphorothioate bond
  modified_base 2: mod_base = OTHER; note = 2'-Fluoro-adenosine
  modified_base 2^3: mod_base = OTHER; note = Phosphorothioate bond
  modified_base 3: mod_base = gm
  modified_base 4: mod_base = um
  modified_base 5: mod_base = um
  modified_base 6: mod_base = OTHER; note = 2'-Fluoro-cytidine
  modified_base 7: mod_base = cm
  modified_base 8: mod_base = OTHER; note = 2'-Fluoro-uridine
  modified_base 9: mod_base = OTHER; note = 2'-Fluoro-uridine
  modified_base 10: mod_base = OTHER; note = 2'-O-methyl-adenosine
  modified_base 11: mod_base = gm
  modified_base 12: mod_base = OTHER; note = 2'-O-methyl-adenosine
  modified_base 13: mod_base = um
  modified_base 14: mod_base = OTHER; note = 2'-Fluoro-uridine
  modified_base 15: mod_base = cm
  modified_base 16: mod_base = OTHER; note = 2'-Fluoro-cytidine
  modified_base 17: mod_base = OTHER; note = 2'-O-methyl-adenosine
  modified_base 18: mod_base = gm
  modified_base 19: mod_base = cm
  modified_base 20: mod_base = OTHER; note = 2'-Fluoro-uridine
  modified_base 21: mod_base = cm
  modified_base 21^22: mod_base = OTHER; note = Phosphorothioate bond
  modified_base 22: mod_base = OTHER; note = 2'-O-methyl-adenosine
  modified_base 22^23: mod_base = OTHER; note = Phosphorothioate bond
  modified_base 23: mod_base = gm
aagttccttagattccagctcag

SEQ ID NO: 860 - RNA, 23 nt, synthetic construct
  source 1..23: mol_type = other RNA
  modified_base 1: mod_base = gm
  modified_base 1^2: mod_base = OTHER; note = Phosphorothioate bond
  modified_base 2: mod_base = OTHER; note = 2'-Fluoro-adenosine
  modified_base 2^3: mod_base = OTHER; note = Phosphorothioate bond
  modified_base 3: mod_base = um
  modified_base 4: mod_base = um
  modified_base 5: mod_base = um
  modified_base 6: mod_base = OTHER; note = 2'-Fluoro-uridine
  modified_base 7: mod_base = OTHER; note = 2'-O-methyl-adenosine
  modified_base 8: mod_base = OTHER; note = 2'-Fluoro-cytidine
  modified_base 9: mod_base = OTHER; note = 2'-Fluoro-adenosine
  modified_base 10: mod_base = cm
  modified_base 11: mod_base = um
  modified_base 12: mod_base = gm
  modified_base 13: mod_base = cm
  modified_base 14: mod_base = OTHER; note = 2'-Fluoro-adenosine
  modified_base 15: mod_base = gm
  modified_base 16: mod_base = OTHER; note = 2'-Fluoro-uridine
  modified_base 17: mod_base = gm
  modified_base 18: mod_base = OTHER; note = 2'-O-methyl-adenosine
  modified_base 19: mod_base = cm
  modified_base 20: mod_base = OTHER; note = 2'-Fluoro-uridine
  modified_base 21: mod_base = um
  modified_base 21^22: mod_base = OTHER; note = Phosphorothioate bond
  modified_base 22: mod_base = gm
  modified_base 22^23: mod_base = OTHER; note = Phosphorothioate bond
  modified_base 23: mod_base = gm
gattttacactgcagtgacttgg

SEQ ID NO: 861 - RNA, 23 nt, synthetic construct
  source 1..23: mol_type = other RNA
  modified_base 1: mod_base = cm
  modified_base 1^2: mod_base = OTHER; note = Phosphorothioate bond
  modified_base 2: mod_base = OTHER; note = 2'-Fluoro-uridine
  modified_base 2^3: mod_base = OTHER; note = Phosphorothioate bond
  modified_base 3: mod_base = um
  modified_base 4: mod_base = cm
  modified_base 5: mod_base = gm
  modified_base 6: mod_base = OTHER; note = 2'-Fluoro-uridine
  modified_base 7: mod_base = OTHER; note = 2'-O-methyl-adenosine
  modified_base 8: mod_base = OTHER; note = 2'-Fluoro-adenosine
  modified_base 9: mod_base = OTHER; note = 2'-Fluoro-adenosine
  modified_base 10: mod_base = gm
  modified_base 11: mod_base = um
  modified_base 12: mod_base = OTHER; note = 2'-O-methyl-adenosine
  modified_base 13: mod_base = gm
  modified_base 14: mod_base = OTHER; note = 2'-Fluoro-adenosine
  modified_base 15: mod_base = gm
  modified_base 16: mod_base = OTHER; note = 2'-Fluoro-cytidine
  modified_base 17: mod_base = um
  modified_base 18: mod_base = um
  modified_base 19: mod_base = gm
  modified_base 20: mod_base = OTHER; note = 2'-Fluoro-adenosine
  modified_base 21: mod_base = um
  modified_base 21^22: mod_base = OTHER; note = Phosphorothioate bond
  modified_base 22: mod_base = OTHER; note = 2'-O-methyl-adenosine
  modified_base 22^23: mod_base = OTHER; note = Phosphorothioate bond
  modified_base 23: mod_base = cm
cttcgtaaagtagagcttgatac

SEQ ID NO: 862 - RNA, 23 nt, synthetic construct
  source 1..23: mol_type = other RNA
  modified_base 1: mod_base = um
  modified_base 1^2: mod_base = OTHER; note = Phosphorothioate bond
  modified_base 2: mod_base = OTHER; note = 2'-Fluoro-adenosine
  modified_base 2^3: mod_base = OTHER; note = Phosphorothioate bond
  modified_base 3: mod_base = cm
  modified_base 4: mod_base = um
  modified_base 5: mod_base = gm
  modified_base 6: mod_base = OTHER; note = 2'-Fluoro-uridine
  modified_base 7: mod_base = um
  modified_base 8: mod_base = OTHER; note = 2'-Fluoro-guanosine
  modified_base 9: mod_base = OTHER; note = 2'-Fluoro-uridine
  modified_base 10: mod_base = um
  modified_base 11: mod_base = um
  modified_base 12: mod_base = gm
  modified_base 13: mod_base = gm
  modified_base 14: mod_base = OTHER; note = 2'-Fluoro-adenosine
  modified_base 15: mod_base = OTHER; note = 2'-O-methyl-adenosine
  modified_base 16: mod_base = OTHER; note = 2'-Fluoro-uridine
  modified_base 17: mod_base = OTHER; note = 2'-O-methyl-adenosine
  modified_base 18: mod_base = gm
  modified_base 19: mod_base = cm
  modified_base 20: mod_base = OTHER; note = 2'-Fluoro-adenosine
  modified_base 21: mod_base = cm
  modified_base 21^22: mod_base = OTHER; note = Phosphorothioate bond
  modified_base 22: mod_base = cm
  modified_base 22^23: mod_base = OTHER; note = Phosphorothioate bond
  modified_base 23: mod_base = gm
tactgttgtttggaatagcaccg

SEQ ID NO: 863 - RNA, 23 nt, synthetic construct
  source 1..23: mol_type = other RNA
  modified_base 1: mod_base = gm
  modified_base 1^2: mod_base = OTHER; note = Phosphorothioate bond
  modified_base 2: mod_base = OTHER; note = 2'-Fluoro-adenosine
  modified_base 2^3: mod_base = OTHER; note = Phosphorothioate bond
  modified_base 3: mod_base = gm
  modified_base 4: mod_base = um
  modified_base 5: mod_base = OTHER; note = 2'-O-methyl-adenosine
  modified_base 6: mod_base = OTHER; note = 2'-Fluoro-cytidine
  modified_base 7: mod_base = um
  modified_base 8: mod_base = OTHER; note = 2'-Fluoro-guanosine
  modified_base 9: mod_base = OTHER; note = 2'-Fluoro-uridine
  modified_base 10: mod_base = um
  modified_base 11: mod_base = gm
  modified_base 12: mod_base = um
  modified_base 13: mod_base = um
  modified_base 14: mod_base = OTHER; note = 2'-Fluoro-uridine
  modified_base 15: mod_base = gm
  modified_base 16: mod_base = OTHER; note = 2'-Fluoro-guanosine
  modified_base 17: mod_base = OTHER; note = 2'-O-methyl-adenosine
  modified_base 18: mod_base = OTHER; note = 2'-O-methyl-adenosine
  modified_base 19: mod_base = um
  modified_base 20: mod_base = OTHER; note = 2'-Fluoro-adenosine
  modified_base 21: mod_base = gm
  modified_base 21^22: mod_base = OTHER; note = Phosphorothioate bond
  modified_base 22: mod_base = cm
  modified_base 22^23: mod_base = OTHER; note = Phosphorothioate bond
  modified_base 23: mod_base = OTHER; note = 2'-O-methyl-adenosine
gagtactgttgtttggaatagca

SEQ ID NO: 864 - RNA, 23 nt, synthetic construct
  source 1..23: mol_type = other RNA
  modified_base 1: mod_base = gm
  modified_base 1^2: mod_base = OTHER; note = Phosphorothioate bond
  modified_base 2: mod_base = OTHER; note = 2'-Fluoro-adenosine
  modified_base 2^3: mod_base = OTHER; note = Phosphorothioate bond
  modified_base 3: mod_base = um
  modified_base 4: mod_base = OTHER; note = 2'-O-methyl-adenosine
  modified_base 5: mod_base = OTHER; note = 2'-O-methyl-adenosine
  modified_base 6: mod_base = OTHER; note = 2'-Fluoro-adenosine
  modified_base 7: mod_base = um
  modified_base 8: mod_base = OTHER; note = 2'-Fluoro-cytidine
  modified_base 9: mod_base = OTHER; note = 2'-Fluoro-uridine
  modified_base 10: mod_base = um
  modified_base 11: mod_base = OTHER; note = 2'-O-methyl-adenosine
  modified_base 12: mod_base = gm
  modified_base 13: mod_base = cm
  modified_base 14: mod_base = OTHER; note = 2'-Fluoro-uridine
  modified_base 15: mod_base = gm
  modified_base 16: mod_base = OTHER; note = 2'-Fluoro-guanosine
  modified_base 17: mod_base = OTHER; note = 2'-O-methyl-adenosine
  modified_base 18: mod_base = cm
  modified_base 19: mod_base = um
  modified_base 20: mod_base = OTHER; note = 2'-Fluoro-cytidine
  modified_base 21: mod_base = OTHER; note = 2'-O-methyl-adenosine
  modified_base 21^22: mod_base = OTHER; note = Phosphorothioate bond
  modified_base 22: mod_base = um
  modified_base 22^23: mod_base = OTHER; note = Phosphorothioate bond
  modified_base 23: mod_base = gm
gataaatcttagctggactcatg

SEQ ID NO: 865 - RNA, 23 nt, synthetic construct
  source 1..23: mol_type = other RNA
  modified_base 1: mod_base = cm
  modified_base 1^2: mod_base = OTHER; note = Phosphorothioate bond
  modified_base 2: mod_base = OTHER; note = 2'-Fluoro-adenosine
  modified_base 2^3: mod_base = OTHER; note = Phosphorothioate bond
  modified_base 3: mod_base = um
  modified_base 4: mod_base = um
  modified_base 5: mod_base = um
  modified_base 6: mod_base = OTHER; note = 2'-Fluoro-cytidine
  modified_base 7: mod_base = um
  modified_base 8: mod_base = OTHER; note = 2'-Fluoro-guanosine
  modified_base 9: mod_base = OTHER; note = 2'-Fluoro-adenosine
  modified_base 10: mod_base = OTHER; note = 2'-O-methyl-adenosine
  modified_base 11: mod_base = gm
  modified_base 12: mod_base = um
  modified_base 13: mod_base = cm
  modified_base 14: mod_base = OTHER; note = 2'-Fluoro-uridine
  modified_base 15: mod_base = gm
  modified_base 16: mod_base = OTHER; note = 2'-Fluoro-cytidine
  modified_base 17: mod_base = OTHER; note = 2'-O-methyl-adenosine
  modified_base 18: mod_base = OTHER; note = 2'-O-methyl-adenosine
  modified_base 19: mod_base = gm
  modified_base 20: mod_base = OTHER; note = 2'-Fluoro-cytidine
  modified_base 21: mod_base = OTHER; note = 2'-O-methyl-adenosine
  modified_base 21^22: mod_base = OTHER; note = Phosphorothioate bond
  modified_base 22: mod_base = gm
  modified_base 22^23: mod_base = OTHER; note = Phosphorothioate bond
  modified_base 23: mod_base = gm
catttctgaagtctgcaagcagg

SEQ ID NO: 866 - RNA, 23 nt, synthetic construct
  source 1..23: mol_type = other RNA
  modified_base 1: mod_base = um
  modified_base 1^2: mod_base = OTHER; note = Phosphorothioate bond
  modified_base 2: mod_base = OTHER; note = 2'-Fluoro-cytidine
  modified_base 2^3: mod_base = OTHER; note = Phosphorothioate bond
  modified_base 3: mod_base = gm
  modified_base 4: mod_base = um
  modified_base 5: mod_base = OTHER; note = 2'-O-methyl-adenosine
  modified_base 6: mod_base = OTHER; note = 2'-Fluoro-adenosine
  modified_base 7: mod_base = OTHER; note = 2'-O-methyl-adenosine
  modified_base 8: mod_base = OTHER; note = 2'-Fluoro-guanosine
  modified_base 9: mod_base = OTHER; note = 2'-Fluoro-uridine
  modified_base 10: mod_base = OTHER; note = 2'-O-methyl-adenosine
  modified_base 11: mod_base = gm
  modified_base 12: mod_base = OTHER; note = 2'-O-methyl-adenosine
  modified_base 13: mod_base = gm
  modified_base 14: mod_base = OTHER; note = 2'-Fluoro-cytidine
  modified_base 15: mod_base = um
  modified_base 16: mod_base = OTHER; note = 2'-Fluoro-uridine
  modified_base 17: mod_base = gm
  modified_base 18: mod_base = OTHER; note = 2'-O-methyl-adenosine
  modified_base 19: mod_base = um
  modified_base 20: mod_base = OTHER; note = 2'-Fluoro-adenosine
  modified_base 21: mod_base = cm
  modified_base 21^22: mod_base = OTHER; note = Phosphorothioate bond
  modified_base 22: mod_base = OTHER; note = 2'-O-methyl-adenosine
  modified_base 22^23: mod_base = OTHER; note = Phosphorothioate bond
  modified_base 23: mod_base = um
tcgtaaagtagagcttgatacat

SEQ ID NO: 867 - RNA, 23 nt, synthetic construct
  source 1..23: mol_type = other RNA
  modified_base 1: mod_base = um
  modified_base 1^2: mod_base = OTHER; note = Phosphorothioate bond
  modified_base 2: mod_base = OTHER; note = 2'-Fluoro-uridine
  modified_base 2^3: mod_base = OTHER; note = Phosphorothioate bond
  modified_base 3: mod_base = cm
  modified_base 4: mod_base = um
  modified_base 5: mod_base = um
  modified_base 6: mod_base = OTHER; note = 2'-Fluoro-guanosine
  modified_base 7: mod_base = um
  modified_base 8: mod_base = OTHER; note = 2'-Fluoro-uridine
  modified_base 9: mod_base = OTHER; note = 2'-Fluoro-uridine
  modified_base 10: mod_base = OTHER; note = 2'-O-methyl-adenosine
  modified_base 11: mod_base = OTHER; note = 2'-O-methyl-adenosine
  modified_base 12: mod_base = um
  modified_base 13: mod_base = OTHER; note = 2'-O-methyl-adenosine
  modified_base 14: mod_base = OTHER; note = 2'-Fluoro-cytidine
  modified_base 15: mod_base = cm
  modified_base 16: mod_base = OTHER; note = 2'-Fluoro-cytidine
  modified_base 17: mod_base = OTHER; note = 2'-O-methyl-adenosine
  modified_base 18: mod_base = cm
  modified_base 19: mod_base = um
  modified_base 20: mod_base = OTHER; note = 2'-Fluoro-guanosine
  modified_base 21: mod_base = gm
  modified_base 21^22: mod_base = OTHER; note = Phosphorothioate bond
  modified_base 22: mod_base = gm
  modified_base 22^23: mod_base = OTHER; note = Phosphorothioate bond
  modified_base 23: mod_base = OTHER; note = 2'-O-methyl-adenosine
ttcttgtttaatacccactggga

SEQ ID NO: 868 - RNA, 23 nt, synthetic construct
  source 1..23: mol_type = other RNA
  modified_base 1: mod_base = OTHER; note = 2'-O-methyl-adenosine
  modified_base 1^2: mod_base = OTHER; note = Phosphorothioate bond
  modified_base 2: mod_base = OTHER; note = 2'-Fluoro-uridine
  modified_base 2^3: mod_base = OTHER; note = Phosphorothioate bond
  modified_base 3: mod_base = um
  modified_base 4: mod_base = cm
  modified_base 5: mod_base = OTHER; note = 2'-O-methyl-adenosine
  modified_base 6: mod_base = OTHER; note = 2'-Fluoro-uridine
  modified_base 7: mod_base = um
  modified_base 8: mod_base = OTHER; note = 2'-Fluoro-cytidine
  modified_base 9: mod_base = OTHER; note = 2'-Fluoro-cytidine
  modified_base 10: mod_base = OTHER; note = 2'-O-methyl-adenosine
  modified_base 11: mod_base = gm
  modified_base 12: mod_base = cm
  modified_base 13: mod_base = um
  modified_base 14: mod_base = OTHER; note = 2'-Fluoro-uridine
  modified_base 15: mod_base = gm
  modified_base 16: mod_base = OTHER; note = 2'-Fluoro-adenosine
  modified_base 17: mod_base = OTHER; note = 2'-O-methyl-adenosine
  modified_base 18: mod_base = gm
  modified_base 19: mod_base = OTHER; note = 2'-O-methyl-adenosine
  modified_base 20: mod_base = OTHER; note = 2'-Fluoro-cytidine
  modified_base 21: mod_base = OTHER; note = 2'-O-methyl-adenosine
  modified_base 21^22: mod_base = OTHER; note = Phosphorothioate bond
  modified_base 22: mod_base = um
  modified_base 22^23: mod_base = OTHER; note = Phosphorothioate bond
  modified_base 23: mod_base = um
attcattccagcttgaagacatt

SEQ ID NO: 869 - RNA, 23 nt, synthetic construct
  source 1..23: mol_type = other RNA
  modified_base 1: mod_base = OTHER; note = 2'-O-methyl-adenosine
  modified_base 1^2: mod_base = OTHER; note = Phosphorothioate bond
  modified_base 2: mod_base = OTHER; note = 2'-Fluoro-adenosine
  modified_base 2^3: mod_base = OTHER; note = Phosphorothioate bond
  modified_base 3: mod_base = um
  modified_base 4: mod_base = um
  modified_base 5: mod_base = gm
  modified_base 6: mod_base = OTHER; note = 2'-Fluoro-adenosine
  modified_base 7: mod_base = gm
  modified_base 8: mod_base = OTHER; note = 2'-Fluoro-guanosine
  modified_base 9: mod_base = OTHER; note = 2'-Fluoro-adenosine
  modified_base 10: mod_base = um
  modified_base 11: mod_base = um
  modified_base 12: mod_base = um
  modified_base 13: mod_base = cm
  modified_base 14: mod_base = OTHER; note = 2'-Fluoro-adenosine
  modified_base 15: mod_base = um
  modified_base 16: mod_base = OTHER; note = 2'-Fluoro-guanosine
  modified_base 17: mod_base = cm
  modified_base 18: mod_base = um
  modified_base 19: mod_base = OTHER; note = 2'-O-methyl-adenosine
  modified_base 20: mod_base = OTHER; note = 2'-Fluoro-cytidine
  modified_base 21: mod_base = um
  modified_base 21^22: mod_base = OTHER; note = Phosphorothioate bond
  modified_base 22: mod_base = um
  modified_base 22^23: mod_base = OTHER; note = Phosphorothioate bond
  modified_base 23: mod_base = OTHER; note = 2'-O-methyl-adenosine
aattgaggatttcatgctactta

SEQ ID NO: 870 - RNA, 23 nt, synthetic construct
  source 1..23: mol_type = other RNA
  modified_base 1: mod_base = um
  modified_base 1^2: mod_base = OTHER; note = Phosphorothioate bond
  modified_base 2: mod_base = OTHER; note = 2'-Fluoro-guanosine
  modified_base 2^3: mod_base = OTHER; note = Phosphorothioate bond
  modified_base 3: mod_base = OTHER; note = 2'-O-methyl-adenosine
  modified_base 4: mod_base = gm
  modified_base 5: mod_base = cm
  modified_base 6: mod_base = OTHER; note = 2'-Fluoro-adenosine
  modified_base 7: mod_base = cm
  modified_base 8: mod_base = OTHER; note = 2'-Fluoro-cytidine
  modified_base 9: mod_base = OTHER; note = 2'-Fluoro-adenosine
  modified_base 10: mod_base = OTHER; note = 2'-O-methyl-adenosine
  modified_base 11: mod_base = um
  modified_base 12: mod_base = cm
  modified_base 13: mod_base = cm
  modified_base 14: mod_base = OTHER; note = 2'-Fluoro-uridine
  modified_base 15: mod_base = gm
  modified_base 16: mod_base = OTHER; note = 2'-Fluoro-uridine
  modified_base 17: mod_base = OTHER; note = 2'-O-methyl-adenosine
  modified_base 18: mod_base = gm
  modified_base 19: mod_base = um
  modified_base 20: mod_base = OTHER; note = 2'-Fluoro-guanosine
  modified_base 21: mod_base = gm
  modified_base 21^22: mod_base = OTHER; note = Phosphorothioate bond
  modified_base 22: mod_base = OTHER; note = 2'-O-methyl-adenosine
  modified_base 22^23: mod_base = OTHER; note = Phosphorothioate bond
  modified_base 23: mod_base = OTHER; note = 2'-O-methyl-adenosine
tgagcaccaatcctgtagtggaa

SEQ ID NO: 871 - RNA, 23 nt, synthetic construct
  source 1..23: mol_type = other RNA
  modified_base 1: mod_base = gm
  modified_base 1^2: mod_base = OTHER; note = Phosphorothioate bond
  modified_base 2: mod_base = OTHER; note = 2'-Fluoro-adenosine
  modified_base 2^3: mod_base = OTHER; note = Phosphorothioate bond
  modified_base 3: mod_base = OTHER; note = 2'-O-methyl-adenosine
  modified_base 4: mod_base = um
  modified_base 5: mod_base = um
  modified_base 6: mod_base = OTHER; note = 2'-Fluoro-guanosine
  modified_base 7: mod_base = um
  modified_base 8: mod_base = OTHER; note = 2'-Fluoro-uridine
  modified_base 9: mod_base = OTHER; note = 2'-Fluoro-guanosine
  modified_base 10: mod_base = gm
  modified_base 11: mod_base = gm
  modified_base 12: mod_base = OTHER; note = 2'-O-methyl-adenosine
  modified_base 13: mod_base = cm
  modified_base 14: mod_base = OTHER; note = 2'-Fluoro-adenosine
  modified_base 15: mod_base = cm
  modified_base 16: mod_base = OTHER; note = 2'-Fluoro-uridine
  modified_base 17: mod_base = um
  modified_base 18: mod_base = OTHER; note = 2'-O-methyl-adenosine
  modified_base 19: mod_base = gm
  modified_base 20: mod_base = OTHER; note = 2'-Fluoro-uridine
  modified_base 21: mod_base = um
  modified_base 21^22: mod_base = OTHER; note = Phosphorothioate bond
  modified_base 22: mod_base = OTHER; note = 2'-O-methyl-adenosine
  modified_base 22^23: mod_base = OTHER; note = Phosphorothioate bond
  modified_base 23: mod_base = cm
gaattgttgggacacttagttac

SEQ ID NO: 872 - RNA, 23 nt, synthetic construct
  source 1..23: mol_type = other RNA
  modified_base 1: mod_base = OTHER; note = 2'-O-methyl-adenosine
  modified_base 1^2: mod_base = OTHER; note = Phosphorothioate bond
  modified_base 2: mod_base = OTHER; note = 2'-Fluoro-uridine
  modified_base 2^3: mod_base = OTHER; note = Phosphorothioate bond
  modified_base 3: mod_base = cm
  modified_base 4: mod_base = OTHER; note = 2'-O-methyl-adenosine
  modified_base 5: mod_base = OTHER; note = 2'-O-methyl-adenosine
  modified_base 6: mod_base = OTHER; note = 2'-Fluoro-uridine
  modified_base 7: mod_base = gm
  modified_base 8: mod_base = OTHER; note = 2'-Fluoro-adenosine
  modified_base 9: mod_base = OTHER; note = 2'-Fluoro-uridine
  modified_base 10: mod_base = gm
  modified_base 11: mod_base = cm
  modified_base 12: mod_base = OTHER; note = 2'-O-methyl-adenosine
  modified_base 13: mod_base = OTHER; note = 2'-O-methyl-adenosine
  modified_base 14: mod_base = OTHER; note = 2'-Fluoro-uridine
  modified_base 15: mod_base = cm
  modified_base 16: mod_base = OTHER; note = 2'-Fluoro-adenosine
  modified_base 17: mod_base = um
  modified_base 18: mod_base = um
  modified_base 19: mod_base = um
  modified_base 20: mod_base = OTHER; note = 2'-Fluoro-cytidine
  modified_base 21: mod_base = um
  modified_base 21^22: mod_base = OTHER; note = Phosphorothioate bond
  modified_base 22: mod_base = um
  modified_base 22^23: mod_base = OTHER; note = Phosphorothioate bond
  modified_base 23: mod_base = cm
atcaatgatgcaatcatttcttc

SEQ ID NO: 873 - RNA, 23 nt, synthetic construct
  source 1..23: mol_type = other RNA
  modified_base 1: mod_base = OTHER; note = 2'-O-methyl-adenosine
  modified_base 1^2: mod_base = OTHER; note = Phosphorothioate bond
  modified_base 2: mod_base = OTHER; note = 2'-Fluoro-guanosine
  modified_base 2^3: mod_base = OTHER; note = Phosphorothioate bond
  modified_base 3: mod_base = um
  modified_base 4: mod_base = cm
  modified_base 5: mod_base = OTHER; note = 2'-O-methyl-adenosine
  modified_base 6: mod_base = OTHER; note = 2'-Fluoro-guanosine
  modified_base 7: mod_base = OTHER; note = 2'-O-methyl-adenosine
  modified_base 8: mod_base = OTHER; note = 2'-Fluoro-cytidine
  modified_base 9: mod_base = OTHER; note = 2'-Fluoro-adenosine
  modified_base 10: mod_base = um
  modified_base 11: mod_base = OTHER; note = 2'-O-methyl-adenosine
  modified_base 12: mod_base = OTHER; note = 2'-O-methyl-adenosine
  modified_base 13: mod_base = OTHER; note = 2'-O-methyl-adenosine
  modified_base 14: mod_base = OTHER; note = 2'-Fluoro-uridine
  modified_base 15: mod_base = gm
  modified_base 16: mod_base = OTHER; note = 2'-Fluoro-adenosine
  modified_base 17: mod_base = um
  modified_base 18: mod_base = cm
  modified_base 19: mod_base = um
  modified_base 20: mod_base = OTHER; note = 2'-Fluoro-cytidine
  modified_base 21: mod_base = OTHER; note = 2'-O-methyl-adenosine
  modified_base 21^22: mod_base = OTHER; note = Phosphorothioate bond
  modified_base 22: mod_base = OTHER; note = 2'-O-methyl-adenosine
  modified_base 22^23: mod_base = OTHER; note = Phosphorothioate bond
  modified_base 23: mod_base = gm
agtcagacataaatgatctcaag

SEQ ID NO: 874 - RNA, 23 nt, synthetic construct
  source 1..23: mol_type = other RNA
  modified_base 1: mod_base = gm
  modified_base 1^2: mod_base = OTHER; note = Phosphorothioate bond
  modified_base 2: mod_base = OTHER; note = 2'-Fluoro-uridine
  modified_base 2^3: mod_base = OTHER; note = Phosphorothioate bond
  modified_base 3: mod_base = um
  modified_base 4: mod_base = um
  modified_base 5: mod_base = um
  modified_base 6: mod_base = OTHER; note = 2'-Fluoro-adenosine
  modified_base 7: mod_base = um
  modified_base 8: mod_base = OTHER; note = 2'-Fluoro-guanosine
  modified_base 9: mod_base = OTHER; note = 2'-Fluoro-uridine
  modified_base 10: mod_base = OTHER; note = 2'-O-methyl-adenosine
  modified_base 11: mod_base = cm
  modified_base 12: mod_base = um
  modified_base 13: mod_base = gm
  modified_base 14: mod_base = OTHER; note = 2'-Fluoro-guanosine
  modified_base 15: mod_base = OTHER; note = 2'-O-methyl-adenosine
  modified_base 16: mod_base = OTHER; note = 2'-Fluoro-cytidine
  modified_base 17: mod_base = OTHER; note = 2'-O-methyl-adenosine
  modified_base 18: mod_base = OTHER; note = 2'-O-methyl-adenosine
  modified_base 19: mod_base = um
  modified_base 20: mod_base = OTHER; note = 2'-Fluoro-adenosine
  modified_base 21: mod_base = um
  modified_base 21^22: mod_base = OTHER; note = Phosphorothioate bond
  modified_base 22: mod_base = um
  modified_base 22^23: mod_base = OTHER; note = Phosphorothioate bond
  modified_base 23: mod_base = OTHER; note = 2'-O-methyl-adenosine
gttttatgtactggacaatatta

SEQ ID NO: 875 - RNA, 23 nt, synthetic construct
  source 1..23: mol_type = other RNA
  modified_base 1: mod_base = OTHER; note = 2'-O-methyl-adenosine
  modified_base 1^2: mod_base = OTHER; note = Phosphorothioate bond
  modified_base 2: mod_base = OTHER; note = 2'-Fluoro-adenosine
  modified_base 2^3: mod_base = OTHER; note = Phosphorothioate bond
  modified_base 3: mod_base = um
  modified_base 4: mod_base = cm
  modified_base 5: mod_base = um
  modified_base 6: mod_base = OTHER; note = 2'-Fluoro-uridine
  modified_base 7: mod_base = OTHER; note = 2'-O-methyl-adenosine
  modified_base 8: mod_base = OTHER; note = 2'-Fluoro-guanosine
  modified_base 9: mod_base = OTHER; note = 2'-Fluoro-cytidine
  modified_base 10: mod_base = um
  modified_base 11: mod_base = gm
  modified_base 12: mod_base = gm
  modified_base 13: mod_base = OTHER; note = 2'-O-methyl-adenosine
  modified_base 14: mod_base = OTHER; note = 2'-Fluoro-cytidine
  modified_base 15: mod_base = um
  modified_base 16: mod_base = OTHER; note = 2'-Fluoro-cytidine
  modified_base 17: mod_base = OTHER; note = 2'-O-methyl-adenosine
  modified_base 18: mod_base = um
  modified_base 19: mod_base = gm
  modified_base 20: mod_base = OTHER; note = 2'-Fluoro-cytidine
  modified_base 21: mod_base = um
  modified_base 21^22: mod_base = OTHER; note = Phosphorothioate bond
  modified_base 22: mod_base = um
  modified_base 22^23: mod_base = OTHER; note = Phosphorothioate bond
  modified_base 23: mod_base = cm
aatcttagctggactcatgcttc

SEQ ID NO: 876 - RNA, 23 nt, synthetic construct
  source 1..23: mol_type = other RNA
  modified_base 1: mod_base = OTHER; note = 2'-O-methyl-adenosine
  modified_base 1^2: mod_base = OTHER; note = Phosphorothioate bond
  modified_base 2: mod_base = OTHER; note = 2'-Fluoro-uridine
  modified_base 2^3: mod_base = OTHER; note = Phosphorothioate bond
  modified_base 3: mod_base = um
  modified_base 4: mod_base = um
  modified_base 5: mod_base = gm
  modified_base 6: mod_base = OTHER; note = 2'-Fluoro-uridine
  modified_base 7: mod_base = cm
  modified_base 8: mod_base = OTHER; note = 2'-Fluoro-cytidine
  modified_base 9: mod_base = OTHER; note = 2'-Fluoro-uridine
  modified_base 10: mod_base = cm
  modified_base 11: mod_base = OTHER; note = 2'-O-methyl-adenosine
  modified_base 12: mod_base = um
  modified_base 13: mod_base = um
  modified_base 14: mod_base = OTHER; note = 2'-Fluoro-uridine
  modified_base 15: mod_base = cm
  modified_base 16: mod_base = OTHER; note = 2'-Fluoro-uridine
  modified_base 17: mod_base = um
  modified_base 18: mod_base = cm
  modified_base 19: mod_base = OTHER; note = 2'-O-methyl-adenosine
  modified_base 20: mod_base = OTHER; note = 2'-Fluoro-adenosine
  modified_base 21: mod_base = OTHER; note = 2'-O-methyl-adenosine
  modified_base 21^22: mod_base = OTHER; note = Phosphorothioate bond
  modified_base 22: mod_base = um
  modified_base 22^23: mod_base = OTHER; note = Phosphorothioate bond
  modified_base 23: mod_base = gm
atttgtcctcatttcttcaaatg

SEQ ID NO: 877 - RNA, 23 nt, synthetic construct
  source 1..23: mol_type = other RNA
  modified_base 1: mod_base = um
  modified_base 1^2: mod_base = OTHER; note = Phosphorothioate bond
  modified_base 2: mod_base = OTHER; note = 2'-Fluoro-uridine
  modified_base 2^3: mod_base = OTHER; note = Phosphorothioate bond
  modified_base 3: mod_base = um
  modified_base 4: mod_base = OTHER; note = 2'-O-methyl-adenosine
  modified_base 5: mod_base = cm
  modified_base 6: mod_base = OTHER; note = 2'-Fluoro-adenosine
  modified_base 7: mod_base = cm
  modified_base 8: mod_base = OTHER; note = 2'-Fluoro-uridine
  modified_base 9: mod_base = OTHER; note = 2'-Fluoro-guanosine
  modified_base 10: mod_base = cm
  modified_base 11: mod_base = OTHER; note = 2'-O-methyl-adenosine
  modified_base 12: mod_base = gm
  modified_base 13: mod_base = um
  modified_base 14: mod_base = OTHER; note = 2'-Fluoro-guanosine
  modified_base 15: mod_base = OTHER; note = 2'-O-methyl-adenosine
  modified_base 16: mod_base = OTHER; note = 2'-Fluoro-cytidine
  modified_base 17: mod_base = um
  modified_base 18: mod_base = um
  modified_base 19: mod_base = gm
  modified_base 20: mod_base = OTHER; note = 2'-Fluoro-guanosine
  modified_base 21: mod_base = OTHER; note = 2'-O-methyl-adenosine
  modified_base 21^22: mod_base = OTHER; note = Phosphorothioate bond
  modified_base 22: mod_base = gm
  modified_base 22^23: mod_base = OTHER; note = Phosphorothioate bond
  modified_base 23: mod_base = gm
tttacactgcagtgacttggagg

SEQ ID NO: 878 - RNA, 23 nt, synthetic construct
  source 1..23: mol_type = other RNA
  modified_base 1: mod_base = um
  modified_base 1^2: mod_base = OTHER; note = Phosphorothioate bond
  modified_base 2: mod_base = OTHER; note = 2'-Fluoro-cytidine
  modified_base 2^3: mod_base = OTHER; note = Phosphorothioate bond
  modified_base 3: mod_base = um
  modified_base 4: mod_base = um
  modified_base 5: mod_base = gm
  modified_base 6: mod_base = OTHER; note = 2'-Fluoro-cytidine
  modified_base 7: mod_base = um
  modified_base 8: mod_base = OTHER; note = 2'-Fluoro-uridine
  modified_base 9: mod_base = OTHER; note = 2'-Fluoro-uridine
  modified_base 10: mod_base = OTHER; note = 2'-O-methyl-adenosine
  modified_base 11: mod_base = um
  modified_base 12: mod_base = um
  modified_base 13: mod_base = gm
  modified_base 14: mod_base = OTHER; note = 2'-Fluoro-guanosine
  modified_base 15: mod_base = um
  modified_base 16: mod_base = OTHER; note = 2'-Fluoro-adenosine
  modified_base 17: mod_base = cm
  modified_base 18: mod_base = um
  modified_base 19: mod_base = gm
  modified_base 20: mod_base = OTHER; note = 2'-Fluoro-adenosine
  modified_base 21: mod_base = gm
  modified_base 21^22: mod_base = OTHER; note = Phosphorothioate bond
  modified_base 22: mod_base = OTHER; note = 2'-O-methyl-adenosine
  modified_base 22^23: mod_base = OTHER; note = Phosphorothioate bond
  modified_base 23: mod_base = OTHER; note = 2'-O-methyl-adenosine
tcttgctttattggtactgagaa

SEQ ID NO: 879 - RNA, 23 nt, synthetic construct
  source 1..23: mol_type = other RNA
  modified_base 1: mod_base = cm
  modified_base 1^2: mod_base = OTHER; note = Phosphorothioate bond
  modified_base 2: mod_base = OTHER; note = 2'-Fluoro-adenosine
  modified_base 2^3: mod_base = OTHER; note = Phosphorothioate bond
  modified_base 3: mod_base = um
  modified_base 4: mod_base = gm
  modified_base 5: mod_base = um
  modified_base 6: mod_base = OTHER; note = 2'-Fluoro-adenosine
  modified_base 7: mod_base = gm
  modified_base 8: mod_base = OTHER; note = 2'-Fluoro-uridine
  modified_base 9: mod_base = OTHER; note = 2'-Fluoro-uridine
  modified_base 10: mod_base = OTHER; note = 2'-O-methyl-adenosine
  modified_base 11: mod_base = um
  modified_base 12: mod_base = um
  modified_base 13: mod_base = cm
  modified_base 14: mod_base = OTHER; note = 2'-Fluoro-uridine
  modified_base 15: mod_base = cm
  modified_base 16: mod_base = OTHER; note = 2'-Fluoro-adenosine
  modified_base 17: mod_base = um
  modified_base 18: mod_base = cm
  modified_base 19: mod_base = gm
  modified_base 20: mod_base = OTHER; note = 2'-Fluoro-guanosine
  modified_base 21: mod_base = um
  modified_base 21^22: mod_base = OTHER; note = Phosphorothioate bond
  modified_base 22: mod_base = cm
  modified_base 22^23: mod_base = OTHER; note = Phosphorothioate bond
  modified_base 23: mod_base = cm
catgtagttattctcatcggtcc

SEQ ID NO: 880 - RNA, 23 nt, synthetic construct
  source 1..23: mol_type = other RNA
  modified_base 1: mod_base = OTHER; note = 2'-O-methyl-adenosine
  modified_base 1^2: mod_base = OTHER; note = Phosphorothioate bond
  modified_base 2: mod_base = OTHER; note = 2'-Fluoro-uridine
  modified_base 2^3: mod_base = OTHER; note = Phosphorothioate bond
  modified_base 3: mod_base = um
  modified_base 4: mod_base = gm
  modified_base 5: mod_base = um
  modified_base 6: mod_base = OTHER; note = 2'-Fluoro-uridine
  modified_base 7: mod_base = um
  modified_base 8: mod_base = OTHER; note = 2'-Fluoro-adenosine
  modified_base 9: mod_base = OTHER; note = 2'-Fluoro-cytidine
  modified_base 10: mod_base = OTHER; note = 2'-O-methyl-adenosine
  modified_base 11: mod_base = gm
  modified_base 12: mod_base = gm
  modified_base 13: mod_base = gm
  modified_base 14: mod_base = OTHER; note = 2'-Fluoro-cytidine
  modified_base 15: mod_base = um
  modified_base 16: mod_base = OTHER; note = 2'-Fluoro-adenosine
  modified_base 17: mod_base = cm
  modified_base 18: mod_base = OTHER; note = 2'-O-methyl-adenosine
  modified_base 19: mod_base = gm
  modified_base 20: mod_base = OTHER; note = 2'-Fluoro-adenosine
  modified_base 21: mod_base = um
  modified_base 21^22: mod_base = OTHER; note = Phosphorothioate bond
  modified_base 22: mod_base = OTHER; note = 2'-O-methyl-adenosine
  modified_base 22^23: mod_base = OTHER; note = Phosphorothioate bond
  modified_base 23: mod_base = gm
attgtttacagggctacagatag

SEQ ID NO: 881 - RNA, 23 nt, synthetic construct
  source 1..23: mol_type = other RNA
  modified_base 1: mod_base = gm
  modified_base 1^2: mod_base = OTHER; note = Phosphorothioate bond
  modified_base 2: mod_base = OTHER; note = 2'-Fluoro-guanosine
  modified_base 2^3: mod_base = OTHER; note = Phosphorothioate bond
  modified_base 3: mod_base = OTHER; note = 2'-O-methyl-adenosine
  modified_base 4: mod_base = OTHER; note = 2'-O-methyl-adenosine
  modified_base 5: mod_base = OTHER; note = 2'-O-methyl-adenosine
  modified_base 6: mod_base = OTHER; note = 2'-Fluoro-uridine
  modified_base 7: mod_base = um
  modified_base 8: mod_base = OTHER; note = 2'-Fluoro-guanosine
  modified_base 9: mod_base = OTHER; note = 2'-Fluoro-adenosine
  modified_base 10: mod_base = gm
  modified_base 11: mod_base = gm
  modified_base 12: mod_base = OTHER; note = 2'-O-methyl-adenosine
  modified_base 13: mod_base = um
  modified_base 14: mod_base = OTHER; note = 2'-Fluoro-uridine
  modified_base 15: mod_base = um
  modified_base 16: mod_base = OTHER; note = 2'-Fluoro-cytidine
  modified_base 17: mod_base = OTHER; note = 2'-O-methyl-adenosine
  modified_base 18: mod_base = um
  modified_base 19: mod_base = gm
  modified_base 20: mod_base = OTHER; note = 2'-Fluoro-cytidine
  modified_base 21: mod_base = um
  modified_base 21^22: mod_base = OTHER; note = Phosphorothioate bond
  modified_base 22: mod_base = OTHER; note = 2'-O-methyl-adenosine
  modified_base 22^23: mod_base = OTHER; note = Phosphorothioate bond
  modified_base 23: mod_base = cm
ggaaattgaggatttcatgctac

SEQ ID NO: 882 - RNA, 23 nt, synthetic construct
  source 1..23: mol_type = other RNA
  modified_base 1: mod_base = gm
  modified_base 1^2: mod_base = OTHER; note = Phosphorothioate bond
  modified_base 2: mod_base = OTHER; note = 2'-Fluoro-uridine
  modified_base 2^3: mod_base = OTHER; note = Phosphorothioate bond
  modified_base 3: mod_base = OTHER; note = 2'-O-methyl-adenosine
  modified_base 4: mod_base = cm
  modified_base 5: mod_base = um
  modified_base 6: mod_base = OTHER; note = 2'-Fluoro-guanosine
  modified_base 7: mod_base = um
  modified_base 8: mod_base = OTHER; note = 2'-Fluoro-uridine
  modified_base 9: mod_base = OTHER; note = 2'-Fluoro-guanosine
  modified_base 10: mod_base = um
  modified_base 11: mod_base = um
  modified_base 12: mod_base = um
  modified_base 13: mod_base = gm
  modified_base 14: mod_base = OTHER; note = 2'-Fluoro-guanosine
  modified_base 15: mod_base = OTHER; note = 2'-O-methyl-adenosine
  modified_base 16: mod_base = OTHER; note = 2'-Fluoro-adenosine
  modified_base 17: mod_base = um
  modified_base 18: mod_base = OTHER; note = 2'-O-methyl-adenosine
  modified_base 19: mod_base = gm
  modified_base 20: mod_base = OTHER; note = 2'-Fluoro-cytidine
  modified_base 21: mod_base = OTHER; note = 2'-O-methyl-adenosine
  modified_base 21^22: mod_base = OTHER; note = Phosphorothioate bond
  modified_base 22: mod_base = cm
  modified_base 22^23: mod_base = OTHER; note = Phosphorothioate bond
  modified_base 23: mod_base = cm
gtactgttgtttggaatagcacc

SEQ ID NO: 883 - RNA, 23 nt, synthetic construct
  source 1..23: mol_type = other RNA
  modified_base 1: mod_base = OTHER; note = 2'-O-methyl-adenosine
  modified_base 1^2: mod_base = OTHER; note = Phosphorothioate bond
  modified_base 2: mod_base = OTHER; note = 2'-Fluoro-cytidine
  modified_base 2^3: mod_base = OTHER; note = Phosphorothioate bond
  modified_base 3: mod_base = um
  modified_base 4: mod_base = gm
  modified_base 5: mod_base = gm
  modified_base 6: mod_base = OTHER; note = 2'-Fluoro-adenosine
  modified_base 7: mod_base = gm
  modified_base 8: mod_base = OTHER; note = 2'-Fluoro-adenosine
  modified_base 9: mod_base = OTHER; note = 2'-Fluoro-uridine
  modified_base 10: mod_base = um
  modified_base 11: mod_base = um
  modified_base 12: mod_base = um
  modified_base 13: mod_base = OTHER; note = 2'-O-methyl-adenosine
  modified_base 14: mod_base = OTHER; note = 2'-Fluoro-cytidine
  modified_base 15: mod_base = OTHER; note = 2'-O-methyl-adenosine
  modified_base 16: mod_base = OTHER; note = 2'-Fluoro-cytidine
  modified_base 17: mod_base = um
  modified_base 18: mod_base = gm
  modified_base 19: mod_base = cm
  modified_base 20: mod_base = OTHER; note = 2'-Fluoro-adenosine
  modified_base 21: mod_base = gm
  modified_base 21^22: mod_base = OTHER; note = Phosphorothioate bond
  modified_base 22: mod_base = um
  modified_base 22^23: mod_base = OTHER; note = Phosphorothioate bond
  modified_base 23: mod_base = gm
actggagattttacactgcagtg

SEQ ID NO: 884 - RNA, 23 nt, synthetic construct
  source 1..23: mol_type = other RNA
  modified_base 1: mod_base = cm
  modified_base 1^2: mod_base = OTHER; note = Phosphorothioate bond
  modified_base 2: mod_base = OTHER; note = 2'-Fluoro-uridine
  modified_base 2^3: mod_base = OTHER; note = Phosphorothioate bond
  modified_base 3: mod_base = gm
  modified_base 4: mod_base = OTHER; note = 2'-O-methyl-adenosine
  modified_base 5: mod_base = um
  modified_base 6: mod_base = OTHER; note = 2'-Fluoro-adenosine
  modified_base 7: mod_base = gm
  modified_base 8: mod_base = OTHER; note = 2'-Fluoro-guanosine
  modified_base 9: mod_base = OTHER; note = 2'-Fluoro-guanosine
  modified_base 10: mod_base = OTHER; note = 2'-O-methyl-adenosine
  modified_base 11: mod_base = OTHER; note = 2'-O-methyl-adenosine
  modified_base 12: mod_base = um
  modified_base 13: mod_base = OTHER; note = 2'-O-methyl-adenosine
  modified_base 14: mod_base = OTHER; note = 2'-Fluoro-adenosine
  modified_base 15: mod_base = um
  modified_base 16: mod_base = OTHER; note = 2'-Fluoro-adenosine
  modified_base 17: mod_base = gm
  modified_base 18: mod_base = um
  modified_base 19: mod_base = cm
  modified_base 20: mod_base = OTHER; note = 2'-Fluoro-uridine
  modified_base 21: mod_base = um
  modified_base 21^22: mod_base = OTHER; note = Phosphorothioate bond
  modified_base 22: mod_base = um
  modified_base 22^23: mod_base = OTHER; note = Phosphorothioate bond
  modified_base 23: mod_base = OTHER; note = 2'-O-methyl-adenosine
ctgatagggaataatagtcttta

SEQ ID NO: 885 - RNA, 23 nt, synthetic construct
  source 1..23: mol_type = other RNA
  modified_base 1: mod_base = gm
  modified_base 1^2: mod_base = OTHER; note = Phosphorothioate bond
  modified_base 2: mod_base = OTHER; note = 2'-Fluoro-adenosine
  modified_base 2^3: mod_base = OTHER; note = Phosphorothioate bond
  modified_base 3: mod_base = OTHER; note = 2'-O-methyl-adenosine
  modified_base 4: mod_base = um
  modified_base 5: mod_base = um
  modified_base 6: mod_base = OTHER; note = 2'-Fluoro-guanosine
  modified_base 7: mod_base = um
  modified_base 8: mod_base = OTHER; note = 2'-Fluoro-guanosine
  modified_base 9: mod_base = OTHER; note = 2'-Fluoro-cytidine
  modified_base 10: mod_base = um
  modified_base 11: mod_base = um
  modified_base 12: mod_base = OTHER; note = 2'-O-methyl-adenosine
  modified_base 13: mod_base = gm
  modified_base 14: mod_base = OTHER; note = 2'-Fluoro-uridine
  modified_base 15: mod_base = OTHER; note = 2'-O-methyl-adenosine
  modified_base 16: mod_base = OTHER; note = 2'-Fluoro-guanosine
  modified_base 17: mod_base = cm
  modified_base 18: mod_base = OTHER; note = 2'-O-methyl-adenosine
  modified_base 19: mod_base = gm
  modified_base 20: mod_base = OTHER; note = 2'-Fluoro-cytidine
  modified_base 21: mod_base = OTHER; note = 2'-O-methyl-adenosine
  modified_base 21^22: mod_base = OTHER; note = Phosphorothioate bond
  modified_base 22: mod_base = OTHER; note = 2'-O-methyl-adenosine
  modified_base 22^23: mod_base = OTHER; note = Phosphorothioate bond
  modified_base 23: mod_base = OTHER; note = 2'-O-methyl-adenosine
gaattgtgcttagtagcagcaaa

SEQ ID NO: 886 - RNA, 23 nt, synthetic construct
  source 1..23: mol_type = other RNA
  modified_base 1: mod_base = OTHER; note = 2'-O-methyl-adenosine
  modified_base 1^2: mod_base = OTHER; note = Phosphorothioate bond
  modified_base 2: mod_base = OTHER; note = 2'-Fluoro-guanosine
  modified_base 2^3: mod_base = OTHER; note = Phosphorothioate bond
  modified_base 3: mod_base = gm
  modified_base 4: mod_base = OTHER; note = 2'-O-methyl-adenosine
  modified_base 5: mod_base = OTHER; note = 2'-O-methyl-adenosine
  modified_base 6: mod_base = OTHER; note = 2'-Fluoro-adenosine
  modified_base 7: mod_base = gm
  modified_base 8: mod_base = OTHER; note = 2'-Fluoro-guanosine
  modified_base 9: mod_base = OTHER; note = 2'-Fluoro-adenosine
  modified_base 10: mod_base = OTHER; note = 2'-O-methyl-adenosine
  modified_base 11: mod_base = cm
  modified_base 12: mod_base = um
  modified_base 13: mod_base = cm
  modified_base 14: mod_base = OTHER; note = 2'-Fluoro-adenosine
  modified_base 15: mod_base = gm
  modified_base 16: mod_base = OTHER; note = 2'-Fluoro-guanosine
  modified_base 17: mod_base = um
  modified_base 18: mod_base = gm
  modified_base 19: mod_base = um
  modified_base 20: mod_base = OTHER; note = 2'-Fluoro-uridine
  modified_base 21: mod_base = gm
  modified_base 21^22: mod_base = OTHER; note = Phosphorothioate bond
  modified_base 22: mod_base = gm
  modified_base 22^23: mod_base = OTHER; note = Phosphorothioate bond
  modified_base 23: mod_base = OTHER; note = 2'-O-methyl-adenosine
aggaaaggaactcaggtgttgga

SEQ ID NO: 887 - RNA, 23 nt, synthetic construct
  source 1..23: mol_type = other RNA
  modified_base 1: mod_base = gm
  modified_base 1^2: mod_base = OTHER; note = Phosphorothioate bond
  modified_base 2: mod_base = OTHER; note = 2'-Fluoro-adenosine
  modified_base 2^3: mod_base = OTHER; note = Phosphorothioate bond
  modified_base 3: mod_base = OTHER; note = 2'-O-methyl-adenosine
  modified_base 4: mod_base = um
  modified_base 5: mod_base = OTHER; note = 2'-O-methyl-adenosine
  modified_base 6: mod_base = OTHER; note = 2'-Fluoro-guanosine
  modified_base 7: mod_base = um
  modified_base 8: mod_base = OTHER; note = 2'-Fluoro-cytidine
  modified_base 9: mod_base = OTHER; note = 2'-Fluoro-adenosine
  modified_base 10: mod_base = gm
  modified_base 11: mod_base = cm
  modified_base 12: mod_base = OTHER; note = 2'-O-methyl-adenosine
  modified_base 13: mod_base = um
  modified_base 14: mod_base = OTHER; note = 2'-Fluoro-cytidine
  modified_base 15: mod_base = um
  modified_base 16: mod_base = OTHER; note = 2'-Fluoro-cytidine
  modified_base 17: mod_base = um
  modified_base 18: mod_base = um
  modified_base 19: mod_base = OTHER; note = 2'-O-methyl-adenosine
  modified_base 20: mod_base = OTHER; note = 2'-Fluoro-cytidine
  modified_base 21: mod_base = OTHER; note = 2'-O-methyl-adenosine
  modified_base 21^22: mod_base = OTHER; note = Phosphorothioate bond
  modified_base 22: mod_base = gm
  modified_base 22^23: mod_base = OTHER; note = Phosphorothioate bond
  modified_base 23: mod_base = OTHER; note = 2'-O-methyl-adenosine
gaatagtcagcatctcttacaga

SEQ ID NO: 888 - RNA, 23 nt, synthetic construct
  source 1..23: mol_type = other RNA
  modified_base 1: mod_base = um
  modified_base 1^2: mod_base = OTHER; note = Phosphorothioate bond
  modified_base 2: mod_base = OTHER; note = 2'-Fluoro-uridine
  modified_base 2^3: mod_base = OTHER; note = Phosphorothioate bond
  modified_base 3: mod_base = um
  modified_base 4: mod_base = OTHER; note = 2'-O-methyl-adenosine
  modified_base 5: mod_base = cm
  modified_base 6: mod_base = OTHER; note = 2'-Fluoro-adenosine
  modified_base 7: mod_base = gm
  modified_base 8: mod_base = OTHER; note = 2'-Fluoro-guanosine
  modified_base 9: mod_base = OTHER; note = 2'-Fluoro-guanosine
  modified_base 10: mod_base = cm
  modified_base 11: mod_base = um
  modified_base 12: mod_base = OTHER; note = 2'-O-methyl-adenosine
  modified_base 13: mod_base = cm
  modified_base 14: mod_base = OTHER; note = 2'-Fluoro-adenosine
  modified_base 15: mod_base = gm
  modified_base 16: mod_base = OTHER; note = 2'-Fluoro-adenosine
  modified_base 17: mod_base = um
  modified_base 18: mod_base = OTHER; note = 2'-O-methyl-adenosine
  modified_base 19: mod_base = gm
  modified_base 20: mod_base = OTHER; note = 2'-Fluoro-adenosine
  modified_base 21: mod_base = um
  modified_base 21^22: mod_base = OTHER; note = Phosphorothioate bond
  modified_base 22: mod_base = cm
  modified_base 22^23: mod_base = OTHER; note = Phosphorothioate bond
  modified_base 23: mod_base = cm
tttacagggctacagatagatcc

SEQ ID NO: 889 - RNA, 23 nt, synthetic construct
  source 1..23: mol_type = other RNA
  modified_base 1: mod_base = OTHER; note = 2'-O-methyl-adenosine
  modified_base 1^2: mod_base = OTHER; note = Phosphorothioate bond
  modified_base 2: mod_base = OTHER; note = 2'-Fluoro-cytidine
  modified_base 2^3: mod_base = OTHER; note = Phosphorothioate bond
  modified_base 3: mod_base = OTHER; note = 2'-O-methyl-adenosine
  modified_base 4: mod_base = um
  modified_base 5: mod_base = um
  modified_base 6: mod_base = OTHER; note = 2'-Fluoro-uridine
  modified_base 7: mod_base = cm
  modified_base 8: mod_base = OTHER; note = 2'-Fluoro-uridine
  modified_base 9: mod_base = OTHER; note = 2'-Fluoro-guanosine
  modified_base 10: mod_base = OTHER; note = 2'-O-methyl-adenosine
  modified_base 11: mod_base = OTHER; note = 2'-O-methyl-adenosine
  modified_base 12: mod_base = gm
  modified_base 13: mod_base = um
  modified_base 14: mod_base = OTHER; note = 2'-Fluoro-cytidine
  modified_base 15: mod_base = um
  modified_base 16: mod_base = OTHER; note = 2'-Fluoro-guanosine
  modified_base 17: mod_base = cm
  modified_base 18: mod_base = OTHER; note = 2'-O-methyl-adenosine
  modified_base 19: mod_base = OTHER; note = 2'-O-methyl-adenosine
  modified_base 20: mod_base = OTHER; note = 2'-Fluoro-guanosine
  modified_base 21: mod_base = cm
  modified_base 21^22: mod_base = OTHER; note = Phosphorothioate bond
  modified_base 22: mod_base = OTHER; note = 2'-O-methyl-adenosine
  modified_base 22^23: mod_base = OTHER; note = Phosphorothioate bond
  modified_base 23: mod_base = gm
acatttctgaagtctgcaagcag

SEQ ID NO: 890 - RNA, 23 nt, synthetic construct
  source 1..23: mol_type = other RNA
  modified_base 1: mod_base = OTHER; note = 2'-O-methyl-adenosine
  modified_base 1^2: mod_base = OTHER; note = Phosphorothioate bond
  modified_base 2: mod_base = OTHER; note = 2'-Fluoro-uridine
  modified_base 2^3: mod_base = OTHER; note = Phosphorothioate bond
  modified_base 3: mod_base = um
  modified_base 4: mod_base = um
  modified_base 5: mod_base = cm
  modified_base 6: mod_base = OTHER; note = 2'-Fluoro-cytidine
  modified_base 7: mod_base = OTHER; note = 2'-O-methyl-adenosine
  modified_base 8: mod_base = OTHER; note = 2'-Fluoro-uridine
  modified_base 9: mod_base = OTHER; note = 2'-Fluoro-guanosine
  modified_base 10: mod_base = OTHER; note = 2'-O-methyl-adenosine
  modified_base 11: mod_base = cm
  modified_base 12: mod_base = um
  modified_base 13: mod_base = cm
  modified_base 14: mod_base = OTHER; note = 2'-Fluoro-cytidine
  modified_base 15: mod_base = OTHER; note = 2'-O-methyl-adenosine
  modified_base 16: mod_base = OTHER; note = 2'-Fluoro-cytidine
  modified_base 17: mod_base = um
  modified_base 18: mod_base = OTHER; note = 2'-O-methyl-adenosine
  modified_base 19: mod_base = OTHER; note = 2'-O-methyl-adenosine
  modified_base 20: mod_base = OTHER; note = 2'-Fluoro-adenosine
  modified_base 21: mod_base = gm
  modified_base 21^22: mod_base = OTHER; note = Phosphorothioate bond
  modified_base 22: mod_base = um
  modified_base 22^23: mod_base = OTHER; note = Phosphorothioate bond
  modified_base 23: mod_base = OTHER; note = 2'-O-methyl-adenosine
atttccatgactccactaaagta

SEQ ID NO: 891 - RNA, 23 nt, synthetic construct
  source 1..23: mol_type = other RNA
  modified_base 1: mod_base = cm
  modified_base 1^2: mod_base = OTHER; note = Phosphorothioate bond
  modified_base 2: mod_base = OTHER; note = 2'-Fluoro-uridine
  modified_base 2^3: mod_base = OTHER; note = Phosphorothioate bond
  modified_base 3: mod_base = um
  modified_base 4: mod_base = um
  modified_base 5: mod_base = gm
  modified_base 6: mod_base = OTHER; note = 2'-Fluoro-adenosine
  modified_base 7: mod_base = um
  modified_base 8: mod_base = OTHER; note = 2'-Fluoro-guanosine
  modified_base 9: mod_base = OTHER; note = 2'-Fluoro-uridine
  modified_base 10: mod_base = OTHER; note = 2'-O-methyl-adenosine
  modified_base 11: mod_base = OTHER; note = 2'-O-methyl-adenosine
  modified_base 12: mod_base = um
  modified_base 13: mod_base = um
  modified_base 14: mod_base = OTHER; note = 2'-Fluoro-uridine
  modified_base 15: mod_base = gm
  modified_base 16: mod_base = OTHER; note = 2'-Fluoro-uridine
  modified_base 17: mod_base = cm
  modified_base 18: mod_base = cm
  modified_base 19: mod_base = um
  modified_base 20: mod_base = OTHER; note = 2'-Fluoro-cytidine
  modified_base 21: mod_base = OTHER; note = 2'-O-methyl-adenosine
  modified_base 21^22: mod_base = OTHER; note = Phosphorothioate bond
  modified_base 22: mod_base = um
  modified_base 22^23: mod_base = OTHER; note = Phosphorothioate bond
  modified_base 23: mod_base = um
ctttgatgtaatttgtcctcatt

SEQ ID NO: 892 - RNA, 23 nt, synthetic construct
  source 1..23: mol_type = other RNA
  modified_base 1: mod_base = um
  modified_base 1^2: mod_base = OTHER; note = Phosphorothioate bond
  modified_base 2: mod_base = OTHER; note = 2'-Fluoro-uridine
  modified_base 2^3: mod_base = OTHER; note = Phosphorothioate bond
  modified_base 3: mod_base = gm
  modified_base 4: mod_base = um
  modified_base 5: mod_base = um
  modified_base 6: mod_base = OTHER; note = 2'-Fluoro-uridine
  modified_base 7: mod_base = gm
  modified_base 8: mod_base = OTHER; note = 2'-Fluoro-guanosine
  modified_base 9: mod_base = OTHER; note = 2'-Fluoro-adenosine
  modified_base 10: mod_base = OTHER; note = 2'-O-methyl-adenosine
  modified_base 11: mod_base = um
  modified_base 12: mod_base = OTHER; note = 2'-O-methyl-adenosine
  modified_base 13: mod_base = gm
  modified_base 14: mod_base = OTHER; note = 2'-Fluoro-cytidine
  modified_base 15: mod_base = OTHER; note = 2'-O-methyl-adenosine
  modified_base 16: mod_base = OTHER; note = 2'-Fluoro-cytidine
  modified_base 17: mod_base = cm
  modified_base 18: mod_base = gm
  modified_base 19: mod_base = gm
  modified_base 20: mod_base = OTHER; note = 2'-Fluoro-adenosine
  modified_base 21: mod_base = OTHER; note = 2'-O-methyl-adenosine
  modified_base 21^22: mod_base = OTHER; note = Phosphorothioate bond
  modified_base 22: mod_base = OTHER; note = 2'-O-methyl-adenosine
  modified_base 22^23: mod_base = OTHER; note = Phosphorothioate bond
  modified_base 23: mod_base = cm
ttgtttggaatagcaccggaaac

SEQ ID NO: 893 - RNA, 21 nt, synthetic construct
  source 1..21: mol_type = other RNA
  modified_base <1: mod_base = OTHER; note = two inverted abasic nucleosides
  modified_base 1: mod_base = OTHER; note = 2'-O-methyl-adenosine
  modified_base 1^2: mod_base = OTHER; note = Phosphorothioate bond
  modified_base 2: mod_base = um
  modified_base 2^3: mod_base = OTHER; note = Phosphorothioate bond
  modified_base 3: mod_base = gm
  modified_base 4: mod_base = gm
  modified_base 5: mod_base = OTHER; note = 2'-O-methyl-adenosine
  modified_base 6: mod_base = um
  modified_base 7: mod_base = gm
  modified_base 8: mod_base = OTHER; note = 2'-O-methyl-adenosine
  modified_base 9: mod_base = OTHER; note = 2'-Fluoro-uridine
  modified_base 10: mod_base = OTHER; note = 2'-Fluoro-adenosine
  modified_base 11: mod_base = OTHER; note = 2'-Fluoro-adenosine
  modified_base 12: mod_base = OTHER; note = 2'-O-methyl-adenosine
  modified_base 13: mod_base = gm
  modified_base 14: mod_base = OTHER; note = 2'-O-methyl-adenosine
  modified_base 15: mod_base = cm
  modified_base 16: mod_base = um
  modified_base 17: mod_base = OTHER; note = 2'-O-methyl-adenosine
  modified_base 18: mod_base = um
  modified_base 19: mod_base = um
  modified_base 20: mod_base = OTHER; note = 2'-O-methyl-adenosine
  modified_base 21: mod_base = um
atggatgataaagactattat

SEQ ID NO: 894 - RNA, 21 nt, synthetic construct
  source 1..21: mol_type = other RNA
  modified_base <1: mod_base = OTHER; note = two inverted abasic nucleosides
  modified_base 1: mod_base = um
  modified_base 1^2: mod_base = OTHER; note = Phosphorothioate bond
  modified_base 2: mod_base = gm
  modified_base 2^3: mod_base = OTHER; note = Phosphorothioate bond
  modified_base 3: mod_base = gm
  modified_base 4: mod_base = OTHER; note = 2'-O-methyl-adenosine
  modified_base 5: mod_base = um
  modified_base 6: mod_base = gm
  modified_base 7: mod_base = OTHER; note = 2'-O-methyl-adenosine
  modified_base 8: mod_base = um
  modified_base 9: mod_base = OTHER; note = 2'-Fluoro-adenosine
  modified_base 10: mod_base = OTHER; note = 2'-Fluoro-adenosine
  modified_base 11: mod_base = OTHER; note = 2'-Fluoro-adenosine
  modified_base 12: mod_base = gm
  modified_base 13: mod_base = OTHER; note = 2'-O-methyl-adenosine
  modified_base 14: mod_base = cm
  modified_base 15: mod_base = um
  modified_base 16: mod_base = OTHER; note = 2'-O-methyl-adenosine
  modified_base 17: mod_base = um
  modified_base 18: mod_base = um
  modified_base 19: mod_base = OTHER; note = 2'-O-methyl-adenosine
  modified_base 20: mod_base = um
  modified_base 21: mod_base = um
tggatgataaagactattatt

SEQ ID NO: 895 - RNA, 21 nt, synthetic construct
  source 1..21: mol_type = other RNA
  modified_base <1: mod_base = OTHER; note = two inverted abasic nucleosides
  modified_base 1: mod_base = um
  modified_base 1^2: mod_base = OTHER; note = Phosphorothioate bond
  modified_base 2: mod_base = um
  modified_base 2^3: mod_base = OTHER; note = Phosphorothioate bond
  modified_base 3: mod_base = um
  modified_base 4: mod_base = OTHER; note = 2'-O-methyl-adenosine
  modified_base 5: mod_base = um
  modified_base 6: mod_base = gm
  modified_base 7: mod_base = gm
  modified_base 8: mod_base = OTHER; note = 2'-O-methyl-adenosine
  modified_base 9: mod_base = OTHER; note = 2'-Fluoro-uridine
  modified_base 10: mod_base = OTHER; note = 2'-Fluoro-guanosine
  modified_base 11: mod_base = OTHER; note = 2'-Fluoro-adenosine
  modified_base 12: mod_base = um
  modified_base 13: mod_base = OTHER; note = 2'-O-methyl-adenosine
  modified_base 14: mod_base = OTHER; note = 2'-O-methyl-adenosine
  modified_base 15: mod_base = OTHER; note = 2'-O-methyl-adenosine
  modified_base 16: mod_base = gm
  modified_base 17: mod_base = OTHER; note = 2'-O-methyl-adenosine
  modified_base 18: mod_base = cm
  modified_base 19: mod_base = um
  modified_base 20: mod_base = OTHER; note = 2'-O-methyl-adenosine
  modified_base 21: mod_base = um
tttatggatgataaagactat

SEQ ID NO: 896 - RNA, 21 nt, synthetic construct
  source 1..21: mol_type = other RNA
  modified_base <1: mod_base = OTHER; note = two inverted abasic nucleosides
  modified_base 1: mod_base = OTHER; note = 2'-O-methyl-adenosine
  modified_base 1^2: mod_base = OTHER; note = Phosphorothioate bond
  modified_base 2: mod_base = um
  modified_base 2^3: mod_base = OTHER; note = Phosphorothioate bond
  modified_base 3: mod_base = OTHER; note = 2'-O-methyl-adenosine
  modified_base 4: mod_base = cm
  modified_base 5: mod_base = OTHER; note = 2'-O-methyl-adenosine
  modified_base 6: mod_base = cm
  modified_base 7: mod_base = cm
  modified_base 8: mod_base = OTHER; note = 2'-O-methyl-adenosine
  modified_base 9: mod_base = OTHER; note = 2'-Fluoro-uridine
  modified_base 10: mod_base = OTHER; note = 2'-Fluoro-cytidine
  modified_base 11: mod_base = OTHER; note = 2'-Fluoro-adenosine
  modified_base 12: mod_base = um
  modified_base 13: mod_base = gm
  modified_base 14: mod_base = OTHER; note = 2'-O-methyl-adenosine
  modified_base 15: mod_base = OTHER; note = 2'-O-methyl-adenosine
  modified_base 16: mod_base = OTHER; note = 2'-O-methyl-adenosine
  modified_base 17: mod_base = gm
  modified_base 18: mod_base = um
  modified_base 19: mod_base = um
  modified_base 20: mod_base = um
  modified_base 21: mod_base = um
atacaccatcatgaaagtttt

SEQ ID NO: 897 - RNA, 21 nt, synthetic construct
  source 1..21: mol_type = other RNA
  modified_base <1: mod_base = OTHER; note = two inverted abasic nucleosides
  modified_base 1: mod_base = gm
  modified_base 1^2: mod_base = OTHER; note = Phosphorothioate bond
  modified_base 2: mod_base = cm
  modified_base 2^3: mod_base = OTHER; note = Phosphorothioate bond
  modified_base 3: mod_base = um
  modified_base 4: mod_base = cm
  modified_base 5: mod_base = um
  modified_base 6: mod_base = OTHER; note = 2'-O-methyl-adenosine
  modified_base 7: mod_base = cm
  modified_base 8: mod_base = um
  modified_base 9: mod_base = OTHER; note = 2'-Fluoro-uridine
  modified_base 10: mod_base = OTHER; note = 2'-Fluoro-uridine
  modified_base 11: mod_base = OTHER; note = 2'-Fluoro-adenosine
  modified_base 12: mod_base = cm
  modified_base 13: mod_base = gm
  modified_base 14: mod_base = OTHER; note = 2'-O-methyl-adenosine
  modified_base 15: mod_base = OTHER; note = 2'-O-methyl-adenosine
  modified_base 16: mod_base = gm
  modified_base 17: mod_base = um
  modified_base 18: mod_base = gm
  modified_base 19: mod_base = um
  modified_base 20: mod_base = um
  modified_base 21: mod_base = um
gctctactttacgaagtgttt

SEQ ID NO: 898 - RNA, 21 nt, synthetic construct
  source 1..21: mol_type = other RNA
  modified_base <1: mod_base = OTHER; note = two inverted abasic nucleosides
  modified_base 1: mod_base = cm
  modified_base 1^2: mod_base = OTHER; note = Phosphorothioate bond
  modified_base 2: mod_base = um
  modified_base 2^3: mod_base = OTHER; note = Phosphorothioate bond
  modified_base 3: mod_base = cm
  modified_base 4: mod_base = um
  modified_base 5: mod_base = OTHER; note = 2'-O-methyl-adenosine
  modified_base 6: mod_base = cm
  modified_base 7: mod_base = um
  modified_base 8: mod_base = um
  modified_base 9: mod_base = OTHER; note = 2'-Fluoro-uridine
  modified_base 10: mod_base = OTHER; note = 2'-Fluoro-adenosine
  modified_base 11: mod_base = OTHER; note = 2'-Fluoro-cytidine
  modified_base 12: mod_base = gm
  modified_base 13: mod_base = OTHER; note = 2'-O-methyl-adenosine
  modified_base 14: mod_base = OTHER; note = 2'-O-methyl-adenosine
  modified_base 15: mod_base = gm
  modified_base 16: mod_base = um
  modified_base 17: mod_base = gm
  modified_base 18: mod_base = um
  modified_base 19: mod_base = um
  modified_base 20: mod_base = um
  modified_base 21: mod_base = cm
ctctactttacgaagtgtttc

SEQ ID NO: 899 - RNA, 21 nt, synthetic construct
  source 1..21: mol_type = other RNA
  modified_base <1: mod_base = OTHER; note = two inverted abasic nucleosides
  modified_base 1: mod_base = um
  modified_base 1^2: mod_base = OTHER; note = Phosphorothioate bond
  modified_base 2: mod_base = um
  modified_base 2^3: mod_base = OTHER; note = Phosphorothioate bond
  modified_base 3: mod_base = OTHER; note = 2'-O-methyl-adenosine
  modified_base 4: mod_base = um
  modified_base 5: mod_base = OTHER; note = 2'-O-methyl-adenosine
  modified_base 6: mod_base = um
  modified_base 7: mod_base = OTHER; note = 2'-O-methyl-adenosine
  modified_base 8: mod_base = um
  modified_base 9: mod_base = OTHER; note = 2'-Fluoro-guanosine
  modified_base 10: mod_base = OTHER; note = 2'-Fluoro-guanosine
  modified_base 11: mod_base = OTHER; note = 2'-Fluoro-adenosine
  modified_base 12: mod_base = um
  modified_base 13: mod_base = um
  modified_base 14: mod_base = cm
  modified_base 15: mod_base = um
  modified_base 16: mod_base = gm
  modified_base 17: mod_base = um
  modified_base 18: mod_base = OTHER; note = 2'-O-methyl-adenosine
  modified_base 19: mod_base = OTHER; note = 2'-O-methyl-adenosine
  modified_base 20: mod_base = gm
  modified_base 21: mod_base = OTHER; note = 2'-O-methyl-adenosine
ttatatatggattctgtaaga

SEQ ID NO: 900 - RNA, 21 nt, synthetic construct
  source 1..21: mol_type = other RNA
  modified_base <1: mod_base = OTHER; note = two inverted abasic nucleosides
  modified_base 1: mod_base = um
  modified_base 1^2: mod_base = OTHER; note = Phosphorothioate bond
  modified_base 2: mod_base = gm
  modified_base 2^3: mod_base = OTHER; note = Phosphorothioate bond
  modified_base 3: mod_base = OTHER; note = 2'-O-methyl-adenosine
  modified_base 4: mod_base = OTHER; note = 2'-O-methyl-adenosine
  modified_base 5: mod_base = cm
  modified_base 6: mod_base = OTHER; note = 2'-O-methyl-adenosine
  modified_base 7: mod_base = gm
  modified_base 8: mod_base = cm
  modified_base 9: mod_base = OTHER; note = 2'-Fluoro-uridine
  modified_base 10: mod_base = OTHER; note = 2'-Fluoro-guanosine
  modified_base 11: mod_base = OTHER; note = 2'-Fluoro-guanosine
  modified_base 12: mod_base = um
  modified_base 13: mod_base = gm
  modified_base 14: mod_base = OTHER; note = 2'-O-methyl-adenosine
  modified_base 15: mod_base = OTHER; note = 2'-O-methyl-adenosine
  modified_base 16: mod_base = OTHER; note = 2'-O-methyl-adenosine
  modified_base 17: mod_base = um
  modified_base 18: mod_base = um
  modified_base 19: mod_base = um
  modified_base 20: mod_base = um
  modified_base 21: mod_base = OTHER; note = 2'-O-methyl-adenosine
tgaacagctggtgaaatttta

SEQ ID NO: 901 - RNA, 21 nt, synthetic construct
  source 1..21: mol_type = other RNA
  modified_base <1: mod_base = OTHER; note = two inverted abasic nucleosides
  modified_base 1: mod_base = cm
  modified_base 1^2: mod_base = OTHER; note = Phosphorothioate bond
  modified_base 2: mod_base = um
  modified_base 2^3: mod_base = OTHER; note = Phosphorothioate bond
  modified_base 3: mod_base = cm
  modified_base 4: mod_base = um
  modified_base 5: mod_base = cm
  modified_base 6: mod_base = um
  modified_base 7: mod_base = cm
  modified_base 8: mod_base = OTHER; note = 2'-O-methyl-adenosine
  modified_base 9: mod_base = OTHER; note = 2'-Fluoro-adenosine
  modified_base 10: mod_base = OTHER; note = 2'-Fluoro-guanosine
  modified_base 11: mod_base = OTHER; note = 2'-Fluoro-uridine
  modified_base 12: mod_base = cm
  modified_base 13: mod_base = cm
  modified_base 14: mod_base = gm
  modified_base 15: mod_base = um
  modified_base 16: mod_base = um
  modified_base 17: mod_base = OTHER; note = 2'-O-methyl-adenosine
  modified_base 18: mod_base = OTHER; note = 2'-O-methyl-adenosine
  modified_base 19: mod_base = gm
  modified_base 20: mod_base = um
  modified_base 21: mod_base = OTHER; note = 2'-O-methyl-adenosine
ctctctcaagtccgttaagta

SEQ ID NO: 902 - RNA, 21 nt, synthetic construct
  source 1..21: mol_type = other RNA
  modified_base <1: mod_base = OTHER; note = two inverted abasic nucleosides
  modified_base 1: mod_base = gm
  modified_base 1^2: mod_base = OTHER; note = Phosphorothioate bond
  modified_base 2: mod_base = OTHER; note = 2'-O-methyl-adenosine
  modified_base 2^3: mod_base = OTHER; note = Phosphorothioate bond
  modified_base 3: mod_base = OTHER; note = 2'-O-methyl-adenosine
  modified_base 4: mod_base = cm
  modified_base 5: mod_base = OTHER; note = 2'-O-methyl-adenosine
  modified_base 6: mod_base = gm
  modified_base 7: mod_base = cm
  modified_base 8: mod_base = um
  modified_base 9: mod_base = OTHER; note = 2'-Fluoro-guanosine
  modified_base 10: mod_base = OTHER; note = 2'-Fluoro-guanosine
  modified_base 11: mod_base = OTHER; note = 2'-Fluoro-uridine
  modified_base 12: mod_base = gm
  modified_base 13: mod_base = OTHER; note = 2'-O-methyl-adenosine
  modified_base 14: mod_base = OTHER; note = 2'-O-methyl-adenosine
  modified_base 15: mod_base = OTHER; note = 2'-O-methyl-adenosine
  modified_base 16: mod_base = um
  modified_base 17: mod_base = um
  modified_base 18: mod_base = um
  modified_base 19: mod_base = um
  modified_base 20: mod_base = OTHER; note = 2'-O-methyl-adenosine
  modified_base 21: mod_base = cm
gaacagctggtgaaattttac

SEQ ID NO: 903 - RNA, 21 nt, synthetic construct
  source 1..21: mol_type = other RNA
  modified_base <1: mod_base = OTHER; note = two inverted abasic nucleosides
  modified_base 1: mod_base = um
  modified_base 1^2: mod_base = OTHER; note = Phosphorothioate bond
  modified_base 2: mod_base = OTHER; note = 2'-O-methyl-adenosine
  modified_base 2^3: mod_base = OTHER; note = Phosphorothioate bond
  modified_base 3: mod_base = um
  modified_base 4: mod_base = OTHER; note = 2'-O-methyl-adenosine
  modified_base 5: mod_base = um
  modified_base 6: mod_base = gm
  modified_base 7: mod_base = gm
  modified_base 8: mod_base = OTHER; note = 2'-O-methyl-adenosine
  modified_base 9: mod_base = OTHER; note = 2'-Fluoro-uridine
  modified_base 10: mod_base = OTHER; note = 2'-Fluoro-uridine
  modified_base 11: mod_base = OTHER; note = 2'-Fluoro-cytidine
  modified_base 12: mod_base = um
  modified_base 13: mod_base = gm
  modified_base 14: mod_base = um
  modified_base 15: mod_base = OTHER; note = 2'-O-methyl-adenosine
  modified_base 16: mod_base = OTHER; note = 2'-O-methyl-adenosine
  modified_base 17: mod_base = gm
  modified_base 18: mod_base = OTHER; note = 2'-O-methyl-adenosine
  modified_base 19: mod_base = gm
  modified_base 20: mod_base = OTHER; note = 2'-O-methyl-adenosine
  modified_base 21: mod_base = um
tatatggattctgtaagagat

SEQ ID NO: 904 - RNA, 21 nt, synthetic construct
  source 1..21: mol_type = other RNA
  modified_base <1: mod_base = OTHER; note = two inverted abasic nucleosides
  modified_base 1: mod_base = OTHER; note = 2'-O-methyl-adenosine
  modified_base 1^2: mod_base = OTHER; note = Phosphorothioate bond
  modified_base 2: mod_base = um
  modified_base 2^3: mod_base = OTHER; note = Phosphorothioate bond
  modified_base 3: mod_base = gm
  modified_base 4: mod_base = um
  modified_base 5: mod_base = OTHER; note = 2'-O-methyl-adenosine
  modified_base 6: mod_base = um
  modified_base 7: mod_base = cm
  modified_base 8: mod_base = OTHER; note = 2'-O-methyl-adenosine
  modified_base 9: mod_base = OTHER; note = 2'-Fluoro-adenosine
  modified_base 10: mod_base = OTHER; note = 2'-Fluoro-guanosine
  modified_base 11: mod_base = OTHER; note = 2'-Fluoro-cytidine
  modified_base 12: mod_base = um
  modified_base 13: mod_base = cm
  modified_base 14: mod_base = um
  modified_base 15: mod_base = OTHER; note = 2'-O-methyl-adenosine
  modified_base 16: mod_base = cm
  modified_base 17: mod_base = um
  modified_base 18: mod_base = um
  modified_base 19: mod_base = um
  modified_base 20: mod_base = OTHER; note = 2'-O-methyl-adenosine
  modified_base 21: mod_base = cm
atgtatcaagctctactttac

SEQ ID NO: 905 - RNA, 21 nt, synthetic construct
  source 1..21: mol_type = other RNA
  modified_base <1: mod_base = OTHER; note = two inverted abasic nucleosides
  modified_base 1: mod_base = cm
  modified_base 1^2: mod_base = OTHER; note = Phosphorothioate bond
  modified_base 2: mod_base = OTHER; note = 2'-O-methyl-adenosine
  modified_base 2^3: mod_base = OTHER; note = Phosphorothioate bond
  modified_base 3: mod_base = cm
  modified_base 4: mod_base = um
  modified_base 5: mod_base = gm
  modified_base 6: mod_base = cm
  modified_base 7: mod_base = OTHER; note = 2'-O-methyl-adenosine
  modified_base 8: mod_base = gm
  modified_base 9: mod_base = OTHER; note = 2'-Fluoro-uridine
  modified_base 10: mod_base = OTHER; note = 2'-Fluoro-guanosine
  modified_base 11: mod_base = OTHER; note = 2'-Fluoro-uridine
  modified_base 12: mod_base = OTHER; note = 2'-O-methyl-adenosine
  modified_base 13: mod_base = OTHER; note = 2'-O-methyl-adenosine
  modified_base 14: mod_base = OTHER; note = 2'-O-methyl-adenosine
  modified_base 15: mod_base = OTHER; note = 2'-O-methyl-adenosine
  modified_base 16: mod_base = um
  modified_base 17: mod_base = cm
  modified_base 18: mod_base = um
  modified_base 19: mod_base = cm
  modified_base 20: mod_base = cm
  modified_base 21: mod_base = OTHER; note = 2'-O-methyl-adenosine
cactgcagtgtaaaatctcca

SEQ ID NO: 906 - RNA, 21 nt, synthetic construct
  source 1..21: mol_type = other RNA
  modified_base <1: mod_base = OTHER; note = two inverted abasic nucleosides
  modified_base 1: mod_base = gm
  modified_base 1^2: mod_base = OTHER; note = Phosphorothioate bond
  modified_base 2: mod_base = gm
  modified_base 2^3: mod_base = OTHER; note = Phosphorothioate bond
  modified_base 3: mod_base = OTHER; note = 2'-O-methyl-adenosine
  modified_base 4: mod_base = gm
  modified_base 5: mod_base = gm
  modified_base 6: mod_base = OTHER; note = 2'-O-methyl-adenosine
  modified_base 7: mod_base = OTHER; note = 2'-O-methyl-adenosine
  modified_base 8: mod_base = OTHER; note = 2'-O-methyl-adenosine
  modified_base 9: mod_base = OTHER; note = 2'-Fluoro-uridine
  modified_base 10: mod_base = OTHER; note = 2'-Fluoro-adenosine
  modified_base 11: mod_base = OTHER; note = 2'-Fluoro-guanosine
  modified_base 12: mod_base = cm
  modified_base 13: mod_base = OTHER; note = 2'-O-methyl-adenosine
  modified_base 14: mod_base = OTHER; note = 2'-O-methyl-adenosine
  modified_base 15: mod_base = OTHER; note = 2'-O-methyl-adenosine
  modified_base 16: mod_base = OTHER; note = 2'-O-methyl-adenosine
  modified_base 17: mod_base = um
  modified_base 18: mod_base = OTHER; note = 2'-O-methyl-adenosine
  modified_base 19: mod_base = OTHER; note = 2'-O-methyl-adenosine
  modified_base 20: mod_base = OTHER; note = 2'-O-methyl-adenosine
  modified_base 21: mod_base = um
ggaggaaatagcaaaataaat

SEQ ID NO: 907 - RNA, 21 nt, synthetic construct
  source 1..21: mol_type = other RNA
  modified_base <1: mod_base = OTHER; note = two inverted abasic nucleosides
  modified_base 1: mod_base = gm
  modified_base 1^2: mod_base = OTHER; note = Phosphorothioate bond
  modified_base 2: mod_base = gm
  modified_base 2^3: mod_base = OTHER; note = Phosphorothioate bond
  modified_base 3: mod_base = OTHER; note = 2'-O-methyl-adenosine
  modified_base 4: mod_base = OTHER; note = 2'-O-methyl-adenosine
  modified_base 5: mod_base = gm
  modified_base 6: mod_base = OTHER; note = 2'-O-methyl-adenosine
  modified_base 7: mod_base = OTHER; note = 2'-O-methyl-adenosine
  modified_base 8: mod_base = OTHER; note = 2'-O-methyl-adenosine
  modified_base 9: mod_base = OTHER; note = 2'-Fluoro-uridine
  modified_base 10: mod_base = OTHER; note = 2'-Fluoro-guanosine
  modified_base 11: mod_base = OTHER; note = 2'-Fluoro-adenosine
  modified_base 12: mod_base = um
  modified_base 13: mod_base = um
  modified_base 14: mod_base = gm
  modified_base 15: mod_base = cm
  modified_base 16: mod_base = OTHER; note = 2'-O-methyl-adenosine
  modified_base 17: mod_base = um
  modified_base 18: mod_base = cm
  modified_base 19: mod_base = OTHER; note = 2'-O-methyl-adenosine
  modified_base 20: mod_base = um
  modified_base 21: mod_base = um
ggaagaaatgattgcatcatt

SEQ ID NO: 908 - RNA, 21 nt, synthetic construct
  source 1..21: mol_type = other RNA
  modified_base <1: mod_base = OTHER; note = two inverted abasic nucleosides
  modified_base 1: mod_base = cm
  modified_base 1^2: mod_base = OTHER; note = Phosphorothioate bond
  modified_base 2: mod_base = OTHER; note = 2'-O-methyl-adenosine
  modified_base 2^3: mod_base = OTHER; note = Phosphorothioate bond
  modified_base 3: mod_base = gm
  modified_base 4: mod_base = um
  modified_base 5: mod_base = gm
  modified_base 6: mod_base = um
  modified_base 7: mod_base = OTHER; note = 2'-O-methyl-adenosine
  modified_base 8: mod_base = OTHER; note = 2'-O-methyl-adenosine
  modified_base 9: mod_base = OTHER; note = 2'-Fluoro-adenosine
  modified_base 10: mod_base = OTHER; note = 2'-Fluoro-adenosine
  modified_base 11: mod_base = OTHER; note = 2'-Fluoro-uridine
  modified_base 12: mod_base = cm
  modified_base 13: mod_base = um
  modified_base 14: mod_base = cm
  modified_base 15: mod_base = cm
  modified_base 16: mod_base = OTHER; note = 2'-O-methyl-adenosine
  modified_base 17: mod_base = gm
  modified_base 18: mod_base = um
  modified_base 19: mod_base = cm
  modified_base 20: mod_base = um
  modified_base 21: mod_base = cm
cagtgtaaaatctccagtctc

SEQ ID NO: 909 - RNA, 21 nt, synthetic construct
  source 1..21: mol_type = other RNA
  modified_base <1: mod_base = OTHER; note = two inverted abasic nucleosides
  modified_base 1: mod_base = um
  modified_base 1^2: mod_base = OTHER; note = Phosphorothioate bond
  modified_base 2: mod_base = gm
  modified_base 2^3: mod_base = OTHER; note = Phosphorothioate bond
  modified_base 3: mod_base = cm
  modified_base 4: mod_base = OTHER; note = 2'-O-methyl-adenosine
  modified_base 5: mod_base = gm
  modified_base 6: mod_base = OTHER; note = 2'-O-methyl-adenosine
  modified_base 7: mod_base = cm
  modified_base 8: mod_base = um
  modified_base 9: mod_base = OTHER; note = 2'-Fluoro-uridine
  modified_base 10: mod_base = OTHER; note = 2'-Fluoro-cytidine
  modified_base 11: mod_base = OTHER; note = 2'-Fluoro-adenosine
  modified_base 12: mod_base = gm
  modified_base 13: mod_base = OTHER; note = 2'-O-methyl-adenosine
  modified_base 14: mod_base = OTHER; note = 2'-O-methyl-adenosine
  modified_base 15: mod_base = OTHER; note = 2'-O-methyl-adenosine
  modified_base 16: mod_base = um
  modified_base 17: mod_base = gm
  modified_base 18: mod_base = um
  modified_base 19: mod_base = cm
  modified_base 20: mod_base = um
  modified_base 21: mod_base = um
tgcagacttcagaaatgtctt

SEQ ID NO: 910 - RNA, 21 nt, synthetic construct
  source 1..21: mol_type = other RNA
  modified_base <1: mod_base = OTHER; note = two inverted abasic nucleosides
  modified_base 1: mod_base = gm
  modified_base 1^2: mod_base = OTHER; note = Phosphorothioate bond
  modified_base 2: mod_base = um
  modified_base 2^3: mod_base = OTHER; note = Phosphorothioate bond
  modified_base 3: mod_base = gm
  modified_base 4: mod_base = um
  modified_base 5: mod_base = OTHER; note = 2'-O-methyl-adenosine
  modified_base 6: mod_base = OTHER; note = 2'-O-methyl-adenosine
  modified_base 7: mod_base = OTHER; note = 2'-O-methyl-adenosine
  modified_base 8: mod_base = OTHER; note = 2'-O-methyl-adenosine
  modified_base 9: mod_base = OTHER; note = 2'-Fluoro-uridine
  modified_base 10: mod_base = OTHER; note = 2'-Fluoro-cytidine
  modified_base 11: mod_base = OTHER; note = 2'-Fluoro-uridine
  modified_base 12: mod_base = cm
  modified_base 13: mod_base = cm
  modified_base 14: mod_base = OTHER; note = 2'-O-methyl-adenosine
  modified_base 15: mod_base = gm
  modified_base 16: mod_base = um
  modified_base 17: mod_base = cm
  modified_base 18: mod_base = um
  modified_base 19: mod_base = cm
  modified_base 20: mod_base = cm
  modified_base 21: mod_base = OTHER; note = 2'-O-methyl-adenosine
gtgtaaaatctccagtctcca

SEQ ID NO: 911 - RNA, 21 nt, synthetic construct
  source 1..21: mol_type = other RNA
  modified_base <1: mod_base = OTHER; note = two inverted abasic nucleosides
  modified_base 1: mod_base = gm
  modified_base 1^2: mod_base = OTHER; note = Phosphorothioate bond
  modified_base 2: mod_base = cm
  modified_base 2^3: mod_base = OTHER; note = Phosphorothioate bond
  modified_base 3: mod_base = um
  modified_base 4: mod_base = gm
  modified_base 5: mod_base = cm
  modified_base 6: mod_base = OTHER; note = 2'-O-methyl-adenosine
  modified_base 7: mod_base = OTHER; note = 2'-O-methyl-adenosine
  modified_base 8: mod_base = OTHER; note = 2'-O-methyl-adenosine
  modified_base 9: mod_base = OTHER; note = 2'-Fluoro-guanosine
  modified_base 10: mod_base = OTHER; note = 2'-Fluoro-uridine
  modified_base 11: mod_base = OTHER; note = 2'-Fluoro-uridine
  modified_base 12: mod_base = um
  modified_base 13: mod_base = um
  modified_base 14: mod_base = cm
  modified_base 15: mod_base = um
  modified_base 16: mod_base = um
  modified_base 17: mod_base = cm
  modified_base 18: mod_base = OTHER; note = 2'-O-methyl-adenosine
  modified_base 19: mod_base = OTHER; note = 2'-O-methyl-adenosine
  modified_base 20: mod_base = OTHER; note = 2'-O-methyl-adenosine
  modified_base 21: mod_base = OTHER; note = 2'-O-methyl-adenosine
gctgcaaagttttcttcaaaa

SEQ ID NO: 912 - RNA, 21 nt, synthetic construct
  source 1..21: mol_type = other RNA
  modified_base <1: mod_base = OTHER; note = two inverted abasic nucleosides
  modified_base 1: mod_base = OTHER; note = 2'-O-methyl-adenosine
  modified_base 1^2: mod_base = OTHER; note = Phosphorothioate bond
  modified_base 2: mod_base = gm
  modified_base 2^3: mod_base = OTHER; note = Phosphorothioate bond
  modified_base 3: mod_base = cm
  modified_base 4: mod_base = um
  modified_base 5: mod_base = gm
  modified_base 6: mod_base = cm
  modified_base 7: mod_base = OTHER; note = 2'-O-methyl-adenosine
  modified_base 8: mod_base = OTHER; note = 2'-O-methyl-adenosine
  modified_base 9: mod_base = OTHER; note = 2'-Fluoro-adenosine
  modified_base 10: mod_base = OTHER; note = 2'-Fluoro-guanosine
  modified_base 11: mod_base = OTHER; note = 2'-Fluoro-uridine
  modified_base 12: mod_base = um
  modified_base 13: mod_base = um
  modified_base 14: mod_base = um
  modified_base 15: mod_base = cm
  modified_base 16: mod_base = um
  modified_base 17: mod_base = um
  modified_base 18: mod_base = cm
  modified_base 19: mod_base = OTHER; note = 2'-O-methyl-adenosine
  modified_base 20: mod_base = OTHER; note = 2'-O-methyl-adenosine
  modified_base 21: mod_base = OTHER; note = 2'-O-methyl-adenosine
agctgcaaagttttcttcaaa

SEQ ID NO: 913 - RNA, 21 nt, synthetic construct
  source 1..21: mol_type = other RNA
  modified_base <1: mod_base = OTHER; note = two inverted abasic nucleosides
  modified_base 1: mod_base = gm
  modified_base 1^2: mod_base = OTHER; note = Phosphorothioate bond
  modified_base 2: mod_base = OTHER; note = 2'-O-methyl-adenosine
  modified_base 2^3: mod_base = OTHER; note = Phosphorothioate bond
  modified_base 3: mod_base = um
  modified_base 4: mod_base = OTHER; note = 2'-O-methyl-adenosine
  modified_base 5: mod_base = OTHER; note = 2'-O-methyl-adenosine
  modified_base 6: mod_base = OTHER; note = 2'-O-methyl-adenosine
  modified_base 7: mod_base = gm
  modified_base 8: mod_base = OTHER; note = 2'-O-methyl-adenosine
  modified_base 9: mod_base = OTHER; note = 2'-Fluoro-cytidine
  modified_base 10: mod_base = OTHER; note = 2'-Fluoro-uridine
  modified_base 11: mod_base = OTHER; note = 2'-Fluoro-adenosine
  modified_base 12: mod_base = um
  modified_base 13: mod_base = um
  modified_base 14: mod_base = OTHER; note = 2'-O-methyl-adenosine
  modified_base 15: mod_base = um
  modified_base 16: mod_base = um
  modified_base 17: mod_base = cm
  modified_base 18: mod_base = cm
  modified_base 19: mod_base = cm
  modified_base 20: mod_base = um
  modified_base 21: mod_base = OTHER; note = 2'-O-methyl-adenosine
gataaagactattattcccta

SEQ ID NO: 914 - RNA, 21 nt, synthetic construct
  source 1..21: mol_type = other RNA
  modified_base <1: mod_base = OTHER; note = two inverted abasic nucleosides
  modified_base 1: mod_base = cm
  modified_base 1^2: mod_base = OTHER; note = Phosphorothioate bond
  modified_base 2: mod_base = OTHER; note = 2'-O-methyl-adenosine
  modified_base 2^3: mod_base = OTHER; note = Phosphorothioate bond
  modified_base 3: mod_base = gm
  modified_base 4: mod_base = OTHER; note = 2'-O-methyl-adenosine
  modified_base 5: mod_base = OTHER; note = 2'-O-methyl-adenosine
  modified_base 6: mod_base = OTHER; note = 2'-O-methyl-adenosine
  modified_base 7: mod_base = OTHER; note = 2'-O-methyl-adenosine
  modified_base 8: mod_base = um
  modified_base 9: mod_base = OTHER; note = 2'-Fluoro-guanosine
  modified_base 10: mod_base = OTHER; note = 2'-Fluoro-uridine
  modified_base 11: mod_base = OTHER; note = 2'-Fluoro-adenosine
  modified_base 12: mod_base = um
  modified_base 13: mod_base = cm
  modified_base 14: mod_base = OTHER; note = 2'-O-methyl-adenosine
  modified_base 15: mod_base = OTHER; note = 2'-O-methyl-adenosine
  modified_base 16: mod_base = gm
  modified_base 17: mod_base = cm
  modified_base 18: mod_base = um
  modified_base 19: mod_base = cm
  modified_base 20: mod_base = um
  modified_base 21: mod_base = OTHER; note = 2'-O-methyl-adenosine
cagaaaatgtatcaagctcta

SEQ ID NO: 915 - RNA, 21 nt, synthetic construct
  source 1..21: mol_type = other RNA
  modified_base <1: mod_base = OTHER; note = two inverted abasic nucleosides
  modified_base 1: mod_base = um
  modified_base 1^2: mod_base = OTHER; note = Phosphorothioate bond
  modified_base 2: mod_base = um
  modified_base 2^3: mod_base = OTHER; note = Phosphorothioate bond
  modified_base 3: mod_base = cm
  modified_base 4: mod_base = um
  modified_base 5: mod_base = cm
  modified_base 6: mod_base = OTHER; note = 2'-O-methyl-adenosine
  modified_base 7: mod_base = gm
  modified_base 8: mod_base = um
  modified_base 9: mod_base = OTHER; note = 2'-Fluoro-adenosine
  modified_base 10: mod_base = OTHER; note = 2'-Fluoro-cytidine
  modified_base 11: mod_base = OTHER; note = 2'-Fluoro-cytidine
  modified_base 12: mod_base = OTHER; note = 2'-O-methyl-adenosine
  modified_base 13: mod_base = OTHER; note = 2'-O-methyl-adenosine
  modified_base 14: mod_base = um
  modified_base 15: mod_base = OTHER; note = 2'-O-methyl-adenosine
  modified_base 16: mod_base = OTHER; note = 2'-O-methyl-adenosine
  modified_base 17: mod_base = OTHER; note = 2'-O-methyl-adenosine
  modified_base 18: mod_base = gm
  modified_base 19: mod_base = cm
  modified_base 20: mod_base = OTHER; note = 2'-O-methyl-adenosine
  modified_base 21: mod_base = OTHER; note = 2'-O-methyl-adenosine
ttctcagtaccaataaagcaa

SEQ ID NO: 916 - RNA, 21 nt, synthetic construct
  source 1..21: mol_type = other RNA
  modified_base <1: mod_base = OTHER; note = two inverted abasic nucleosides
  modified_base 1: mod_base = gm
  modified_base 1^2: mod_base = OTHER; note = Phosphorothioate bond
  modified_base 2: mod_base = OTHER; note = 2'-O-methyl-adenosine
  modified_base 2^3: mod_base = OTHER; note = Phosphorothioate bond
  modified_base 3: mod_base = um
  modified_base 4: mod_base = OTHER; note = 2'-O-methyl-adenosine
  modified_base 5: mod_base = OTHER; note = 2'-O-methyl-adenosine
  modified_base 6: mod_base = gm
  modified_base 7: mod_base = OTHER; note = 2'-O-methyl-adenosine
  modified_base 8: mod_base = um
  modified_base 9: mod_base = OTHER; note = 2'-Fluoro-uridine
  modified_base 10: mod_base = OTHER; note = 2'-Fluoro-cytidine
  modified_base 11: mod_base = OTHER; note = 2'-Fluoro-guanosine
  modified_base 12: mod_base = OTHER; note = 2'-O-methyl-adenosine
  modified_base 13: mod_base = cm
  modified_base 14: mod_base = gm
  modified_base 15: mod_base = OTHER; note = 2'-O-methyl-adenosine
  modified_base 16: mod_base = OTHER; note = 2'-O-methyl-adenosine
  modified_base 17: mod_base = OTHER; note = 2'-O-methyl-adenosine
  modified_base 18: mod_base = gm
  modified_base 19: mod_base = OTHER; note = 2'-O-methyl-adenosine
  modified_base 20: mod_base = OTHER; note = 2'-O-methyl-adenosine
  modified_base 21: mod_base = um
gataagattcgacgaaagaat

SEQ ID NO: 917 - RNA, 21 nt, synthetic construct
  source 1..21: mol_type = other RNA
  modified_base <1: mod_base = OTHER; note = two inverted abasic nucleosides
  modified_base 1: mod_base = gm
  modified_base 1^2: mod_base = OTHER; note = Phosphorothioate bond
  modified_base 2: mod_base = gm
  modified_base 2^3: mod_base = OTHER; note = Phosphorothioate bond
  modified_base 3: mod_base = um
  modified_base 4: mod_base = um
  modified_base 5: mod_base = um
  modified_base 6: mod_base = OTHER; note = 2'-O-methyl-adenosine
  modified_base 7: mod_base = um
  modified_base 8: mod_base = OTHER; note = 2'-O-methyl-adenosine
  modified_base 9: mod_base = OTHER; note = 2'-Fluoro-uridine
  modified_base 10: mod_base = OTHER; note = 2'-Fluoro-adenosine
  modified_base 11: mod_base = OTHER; note = 2'-Fluoro-uridine
  modified_base 12: mod_base = gm
  modified_base 13: mod_base = gm
  modified_base 14: mod_base = OTHER; note = 2'-O-methyl-adenosine
  modified_base 15: mod_base = um
  modified_base 16: mod_base = um
  modified_base 17: mod_base = cm
  modified_base 18: mod_base = um
  modified_base 19: mod_base = gm
  modified_base 20: mod_base = um
  modified_base 21: mod_base = OTHER; note = 2'-O-methyl-adenosine
ggtttatatatggattctgta

SEQ ID NO: 918 - RNA, 21 nt, synthetic construct
  source 1..21: mol_type = other RNA
  modified_base <1: mod_base = OTHER; note = two inverted abasic nucleosides
  modified_base 1: mod_base = gm
  modified_base 1^2: mod_base = OTHER; note = Phosphorothioate bond
  modified_base 2: mod_base = cm
  modified_base 2^3: mod_base = OTHER; note = Phosphorothioate bond
  modified_base 3: mod_base = um
  modified_base 4: mod_base = OTHER; note = 2'-O-methyl-adenosine
  modified_base 5: mod_base = cm
  modified_base 6: mod_base = um
  modified_base 7: mod_base = OTHER; note = 2'-O-methyl-adenosine
  modified_base 8: mod_base = OTHER; note = 2'-O-methyl-adenosine
  modified_base 9: mod_base = OTHER; note = 2'-Fluoro-guanosine
  modified_base 10: mod_base = OTHER; note = 2'-Fluoro-cytidine
  modified_base 11: mod_base = OTHER; note = 2'-Fluoro-adenosine
  modified_base 12: mod_base = cm
  modified_base 13: mod_base = OTHER; note = 2'-O-methyl-adenosine
  modified_base 14: mod_base = OTHER; note = 2'-O-methyl-adenosine
  modified_base 15: mod_base = um
  modified_base 16: mod_base = um
  modified_base 17: mod_base = cm
  modified_base 18: mod_base = cm
  modified_base 19: mod_base = OTHER; note = 2'-O-methyl-adenosine
  modified_base 20: mod_base = OTHER; note = 2'-O-methyl-adenosine
  modified_base 21: mod_base = OTHER; note = 2'-O-methyl-adenosine
gctactaagcacaattccaaa

SEQ ID NO: 919 - RNA, 21 nt, synthetic construct
  source 1..21: mol_type = other RNA
  modified_base <1: mod_base = OTHER; note = two inverted abasic nucleosides
  modified_base 1: mod_base = cm
  modified_base 1^2: mod_base = OTHER; note = Phosphorothioate bond
  modified_base 2: mod_base = um
  modified_base 2^3: mod_base = OTHER; note = Phosphorothioate bond
  modified_base 3: mod_base = cm
  modified_base 4: mod_base = cm
  modified_base 5: mod_base = OTHER; note = 2'-O-methyl-adenosine
  modified_base 6: mod_base = OTHER; note = 2'-O-methyl-adenosine
  modified_base 7: mod_base = gm
  modified_base 8: mod_base = um
  modified_base 9: mod_base = OTHER; note = 2'-Fluoro-cytidine
  modified_base 10: mod_base = OTHER; note = 2'-Fluoro-adenosine
  modified_base 11: mod_base = OTHER; note = 2'-Fluoro-cytidine
  modified_base 12: mod_base = um
  modified_base 13: mod_base = gm
  modified_base 14: mod_base = cm
  modified_base 15: mod_base = OTHER; note = 2'-O-methyl-adenosine
  modified_base 16: mod_base = gm
  modified_base 17: mod_base = um
  modified_base 18: mod_base = gm
  modified_base 19: mod_base = um
  modified_base 20: mod_base = OTHER; note = 2'-O-methyl-adenosine
  modified_base 21: mod_base = OTHER; note = 2'-O-methyl-adenosine
ctccaagtcactgcagtgtaa

SEQ ID NO: 920 - RNA, 21 nt, synthetic construct
  source 1..21: mol_type = other RNA
  modified_base <1: mod_base = OTHER; note = two inverted abasic nucleosides
  modified_base 1: mod_base = um
  modified_base 1^2: mod_base = OTHER; note = Phosphorothioate bond
  modified_base 2: mod_base = um
  modified_base 2^3: mod_base = OTHER; note = Phosphorothioate bond
  modified_base 3: mod_base = gm
  modified_base 4: mod_base = OTHER; note = 2'-O-methyl-adenosine
  modified_base 5: mod_base = OTHER; note = 2'-O-methyl-adenosine
  modified_base 6: mod_base = cm
  modified_base 7: mod_base = OTHER; note = 2'-O-methyl-adenosine
  modified_base 8: mod_base = gm
  modified_base 9: mod_base = OTHER; note = 2'-Fluoro-cytidine
  modified_base 10: mod_base = OTHER; note = 2'-Fluoro-uridine
  modified_base 11: mod_base = OTHER; note = 2'-Fluoro-guanosine
  modified_base 12: mod_base = gm
  modified_base 13: mod_base = um
  modified_base 14: mod_base = gm
  modified_base 15: mod_base = OTHER; note = 2'-O-methyl-adenosine
  modified_base 16: mod_base = OTHER; note = 2'-O-methyl-adenosine
  modified_base 17: mod_base = OTHER; note = 2'-O-methyl-adenosine
  modified_base 18: mod_base = um
  modified_base 19: mod_base = um
  modified_base 20: mod_base = um
  modified_base 21: mod_base = um
ttgaacagctggtgaaatttt

SEQ ID NO: 921 - RNA, 21 nt, synthetic construct
  source 1..21: mol_type = other RNA
  modified_base <1: mod_base = OTHER; note = two inverted abasic nucleosides
  modified_base 1: mod_base = cm
  modified_base 1^2: mod_base = OTHER; note = Phosphorothioate bond
  modified_base 2: mod_base = OTHER; note = 2'-O-methyl-adenosine
  modified_base 2^3: mod_base = OTHER; note = Phosphorothioate bond
  modified_base 3: mod_base = um
  modified_base 4: mod_base = gm
  modified_base 5: mod_base = OTHER; note = 2'-O-methyl-adenosine
  modified_base 6: mod_base = OTHER; note = 2'-O-methyl-adenosine
  modified_base 7: mod_base = OTHER; note = 2'-O-methyl-adenosine
  modified_base 8: mod_base = gm
  modified_base 9: mod_base = OTHER; note = 2'-Fluoro-uridine
  modified_base 10: mod_base = OTHER; note = 2'-Fluoro-uridine
  modified_base 11: mod_base = OTHER; note = 2'-Fluoro-uridine
  modified_base 12: mod_base = um
  modified_base 13: mod_base = gm
  modified_base 14: mod_base = cm
  modified_base 15: mod_base = um
  modified_base 16: mod_base = gm
  modified_base 17: mod_base = cm
  modified_base 18: mod_base = um
  modified_base 19: mod_base = OTHER; note = 2'-O-methyl-adenosine
  modified_base 20: mod_base = cm
  modified_base 21: mod_base = um
catgaaagttttgctgctact

SEQ ID NO: 922 - RNA, 21 nt, synthetic construct
  source 1..21: mol_type = other RNA
  modified_base <1: mod_base = OTHER; note = two inverted abasic nucleosides
  modified_base 1: mod_base = cm
  modified_base 1^2: mod_base = OTHER; note = Phosphorothioate bond
  modified_base 2: mod_base = cm
  modified_base 2^3: mod_base = OTHER; note = Phosphorothioate bond
  modified_base 3: mod_base = OTHER; note = 2'-O-methyl-adenosine
  modified_base 4: mod_base = gm
  modified_base 5: mod_base = OTHER; note = 2'-O-methyl-adenosine
  modified_base 6: mod_base = OTHER; note = 2'-O-methyl-adenosine
  modified_base 7: mod_base = OTHER; note = 2'-O-methyl-adenosine
  modified_base 8: mod_base = OTHER; note = 2'-O-methyl-adenosine
  modified_base 9: mod_base = OTHER; note = 2'-Fluoro-uridine
  modified_base 10: mod_base = OTHER; note = 2'-Fluoro-guanosine
  modified_base 11: mod_base = OTHER; note = 2'-Fluoro-uridine
  modified_base 12: mod_base = OTHER; note = 2'-O-methyl-adenosine
  modified_base 13: mod_base = um
  modified_base 14: mod_base = cm
  modified_base 15: mod_base = OTHER; note = 2'-O-methyl-adenosine
  modified_base 16: mod_base = OTHER; note = 2'-O-methyl-adenosine
  modified_base 17: mod_base = gm
  modified_base 18: mod_base = cm
  modified_base 19: mod_base = um
  modified_base 20: mod_base = cm
  modified_base 21: mod_base = um
ccagaaaatgtatcaagctct

SEQ ID NO: 923 - RNA, 21 nt, synthetic construct
  source 1..21: mol_type = other RNA
  modified_base <1: mod_base = OTHER; note = two inverted abasic nucleosides
  modified_base 1: mod_base = OTHER; note = 2'-O-methyl-adenosine
  modified_base 1^2: mod_base = OTHER; note = Phosphorothioate bond
  modified_base 2: mod_base = gm
  modified_base 2^3: mod_base = OTHER; note = Phosphorothioate bond
  modified_base 3: mod_base = um
  modified_base 4: mod_base = cm
  modified_base 5: mod_base = OTHER; note = 2'-O-methyl-adenosine
  modified_base 6: mod_base = cm
  modified_base 7: mod_base = um
  modified_base 8: mod_base = gm
  modified_base 9: mod_base = OTHER; note = 2'-Fluoro-cytidine
  modified_base 10: mod_base = OTHER; note = 2'-Fluoro-adenosine
  modified_base 11: mod_base = OTHER; note = 2'-Fluoro-guanosine
  modified_base 12: mod_base = um
  modified_base 13: mod_base = gm
  modified_base 14: mod_base = um
  modified_base 15: mod_base = OTHER; note = 2'-O-methyl-adenosine
  modified_base 16: mod_base = OTHER; note = 2'-O-methyl-adenosine
  modified_base 17: mod_base = OTHER; note = 2'-O-methyl-adenosine
  modified_base 18: mod_base = OTHER; note = 2'-O-methyl-adenosine
  modified_base 19: mod_base = um
  modified_base 20: mod_base = cm
  modified_base 21: mod_base = um
agtcactgcagtgtaaaatct

SEQ ID NO: 924 - RNA, 21 nt, synthetic construct
  source 1..21: mol_type = other RNA
  modified_base <1: mod_base = OTHER; note = two inverted abasic nucleosides
  modified_base 1: mod_base = um
  modified_base 1^2: mod_base = OTHER; note = Phosphorothioate bond
  modified_base 2: mod_base = um
  modified_base 2^3: mod_base = OTHER; note = Phosphorothioate bond
  modified_base 3: mod_base = OTHER; note = 2'-O-methyl-adenosine
  modified_base 4: mod_base = gm
  modified_base 5: mod_base = OTHER; note = 2'-O-methyl-adenosine
  modified_base 6: mod_base = OTHER; note = 2'-O-methyl-adenosine
  modified_base 7: mod_base = um
  modified_base 8: mod_base = OTHER; note = 2'-O-methyl-adenosine
  modified_base 9: mod_base = OTHER; note = 2'-Fluoro-cytidine
  modified_base 10: mod_base = OTHER; note = 2'-Fluoro-adenosine
  modified_base 11: mod_base = OTHER; note = 2'-Fluoro-uridine
  modified_base 12: mod_base = um
  modified_base 13: mod_base = cm
  modified_base 14: mod_base = cm
  modified_base 15: mod_base = OTHER; note = 2'-O-methyl-adenosine
  modified_base 16: mod_base = gm
  modified_base 17: mod_base = OTHER; note = 2'-O-methyl-adenosine
  modified_base 18: mod_base = OTHER; note = 2'-O-methyl-adenosine
  modified_base 19: mod_base = OTHER; note = 2'-O-methyl-adenosine
  modified_base 20: mod_base = OTHER; note = 2'-O-methyl-adenosine
  modified_base 21: mod_base = um
ttagaatacattccagaaaat

SEQ ID NO: 925 - RNA, 21 nt, synthetic construct
  source 1..21: mol_type = other RNA
  modified_base <1: mod_base = OTHER; note = two inverted abasic nucleosides
  modified_base 1: mod_base = um
  modified_base 1^2: mod_base = OTHER; note = Phosphorothioate bond
  modified_base 2: mod_base = gm
  modified_base 2^3: mod_base = OTHER; note = Phosphorothioate bond
  modified_base 3: mod_base = OTHER; note = 2'-O-methyl-adenosine
  modified_base 4: mod_base = gm
  modified_base 5: mod_base = um
  modified_base 6: mod_base = cm
  modified_base 7: mod_base = cm
  modified_base 8: mod_base = OTHER; note = 2'-O-methyl-adenosine
  modified_base 9: mod_base = OTHER; note = 2'-Fluoro-uridine
  modified_base 10: mod_base = OTHER; note = 2'-Fluoro-guanosine
  modified_base 11: mod_base = OTHER; note = 2'-Fluoro-guanosine
  modified_base 12: mod_base = gm
  modified_base 13: mod_base = um
  modified_base 14: mod_base = um
  modified_base 15: mod_base = um
  modified_base 16: mod_base = OTHER; note = 2'-O-methyl-adenosine
  modified_base 17: mod_base = um
  modified_base 18: mod_base = OTHER; note = 2'-O-methyl-adenosine
  modified_base 19: mod_base = um
  modified_base 20: mod_base = OTHER; note = 2'-O-methyl-adenosine
  modified_base 21: mod_base = um
tgagtccatgggtttatatat

SEQ ID NO: 926 - RNA, 21 nt, synthetic construct
  source 1..21: mol_type = other RNA
  modified_base <1: mod_base = OTHER; note = two inverted abasic nucleosides
  modified_base 1: mod_base = OTHER; note = 2'-O-methyl-adenosine
  modified_base 1^2: mod_base = OTHER; note = Phosphorothioate bond
  modified_base 2: mod_base = um
  modified_base 2^3: mod_base = OTHER; note = Phosphorothioate bond
  modified_base 3: mod_base = cm
  modified_base 4: mod_base = gm
  modified_base 5: mod_base = gm
  modified_base 6: mod_base = cm
  modified_base 7: mod_base = um
  modified_base 8: mod_base = OTHER; note = 2'-O-methyl-adenosine
  modified_base 9: mod_base = OTHER; note = 2'-Fluoro-guanosine
  modified_base 10: mod_base = OTHER; note = 2'-Fluoro-adenosine
  modified_base 11: mod_base = OTHER; note = 2'-Fluoro-guanosine
  modified_base 12: mod_base = OTHER; note = 2'-O-methyl-adenosine
  modified_base 13: mod_base = cm
  modified_base 14: mod_base = cm
  modified_base 15: mod_base = OTHER; note = 2'-O-methyl-adenosine
  modified_base 16: mod_base = OTHER; note = 2'-O-methyl-adenosine
  modified_base 17: mod_base = um
  modified_base 18: mod_base = cm
  modified_base 19: mod_base = um
  modified_base 20: mod_base = um
  modified_base 21: mod_base = um
atcggctagagaccaatcttt

SEQ ID NO: 927 - RNA, 21 nt, synthetic construct
  source 1..21: mol_type = other RNA
  modified_base <1: mod_base = OTHER; note = two inverted abasic nucleosides
  modified_base 1: mod_base = um
  modified_base 1^2: mod_base = OTHER; note = Phosphorothioate bond
  modified_base 2: mod_base = cm
  modified_base 2^3: mod_base = OTHER; note = Phosphorothioate bond
  modified_base 3: mod_base = cm
  modified_base 4: mod_base = um
  modified_base 5: mod_base = um
  modified_base 6: mod_base = um
  modified_base 7: mod_base = OTHER; note = 2'-O-methyl-adenosine
  modified_base 8: mod_base = um
  modified_base 9: mod_base = OTHER; note = 2'-Fluoro-guanosine
  modified_base 10: mod_base = OTHER; note = 2'-Fluoro-guanosine
  modified_base 11: mod_base = OTHER; note = 2'-Fluoro-adenosine
  modified_base 12: mod_base = um
  modified_base 13: mod_base = gm
  modified_base 14: mod_base = OTHER; note = 2'-O-methyl-adenosine
  modified_base 15: mod_base = um
  modified_base 16: mod_base = OTHER; note = 2'-O-methyl-adenosine
  modified_base 17: mod_base = OTHER; note = 2'-O-methyl-adenosine
  modified_base 18: mod_base = OTHER; note = 2'-O-methyl-adenosine
  modified_base 19: mod_base = gm
  modified_base 20: mod_base = OTHER; note = 2'-O-methyl-adenosine
  modified_base 21: mod_base = cm
tcctttatggatgataaagac

SEQ ID NO: 928 - RNA, 21 nt, synthetic construct
  source 1..21: mol_type = other RNA
  modified_base <1: mod_base = OTHER; note = two inverted abasic nucleosides
  modified_base 1: mod_base = gm
  modified_base 1^2: mod_base = OTHER; note = Phosphorothioate bond
  modified_base 2: mod_base = um
  modified_base 2^3: mod_base = OTHER; note = Phosphorothioate bond
  modified_base 3: mod_base = um
  modified_base 4: mod_base = gm
  modified_base 5: mod_base = OTHER; note = 2'-O-methyl-adenosine
  modified_base 6: mod_base = OTHER; note = 2'-O-methyl-adenosine
  modified_base 7: mod_base = cm
  modified_base 8: mod_base = OTHER; note = 2'-O-methyl-adenosine
  modified_base 9: mod_base = OTHER; note = 2'-Fluoro-guanosine
  modified_base 10: mod_base = OTHER; note = 2'-Fluoro-cytidine
  modified_base 11: mod_base = OTHER; note = 2'-Fluoro-uridine
  modified_base 12: mod_base = gm
  modified_base 13: mod_base = gm
  modified_base 14: mod_base = um
  modified_base 15: mod_base = gm
  modified_base 16: mod_base = OTHER; note = 2'-O-methyl-adenosine
  modified_base 17: mod_base = OTHER; note = 2'-O-methyl-adenosine
  modified_base 18: mod_base = OTHER; note = 2'-O-methyl-adenosine
  modified_base 19: mod_base = um
  modified_base 20: mod_base = um
  modified_base 21: mod_base = um
gttgaacagctggtgaaattt

SEQ ID NO: 929 - RNA, 21 nt, synthetic construct
  source 1..21: mol_type = other RNA
  modified_base <1: mod_base = OTHER; note = two inverted abasic nucleosides
  modified_base 1: mod_base = OTHER; note = 2'-O-methyl-adenosine
  modified_base 1^2: mod_base = OTHER; note = Phosphorothioate bond
  modified_base 2: mod_base = OTHER; note = 2'-O-methyl-adenosine
  modified_base 2^3: mod_base = OTHER; note = Phosphorothioate bond
  modified_base 3: mod_base = um
  modified_base 4: mod_base = gm
  modified_base 5: mod_base = um
  modified_base 6: mod_base = OTHER; note = 2'-O-methyl-adenosine
  modified_base 7: mod_base = um
  modified_base 8: mod_base = cm
  modified_base 9: mod_base = OTHER; note = 2'-Fluoro-adenosine
  modified_base 10: mod_base = OTHER; note = 2'-Fluoro-adenosine
  modified_base 11: mod_base = OTHER; note = 2'-Fluoro-guanosine
  modified_base 12: mod_base = cm
  modified_base 13: mod_base = um
  modified_base 14: mod_base = cm
  modified_base 15: mod_base = um
  modified_base 16: mod_base = OTHER; note = 2'-O-methyl-adenosine
  modified_base 17: mod_base = cm
  modified_base 18: mod_base = um
  modified_base 19: mod_base = um
  modified_base 20: mod_base = um
  modified_base 21: mod_base = OTHER; note = 2'-O-methyl-adenosine
aatgtatcaagctctacttta

SEQ ID NO: 930 - RNA, 21 nt, synthetic construct
  source 1..21: mol_type = other RNA
  modified_base <1: mod_base = OTHER; note = two inverted abasic nucleosides
  modified_base 1: mod_base = um
  modified_base 1^2: mod_base = OTHER; note = Phosphorothioate bond
  modified_base 2: mod_base = um
  modified_base 2^3: mod_base = OTHER; note = Phosphorothioate bond
  modified_base 3: mod_base = OTHER; note = 2'-O-methyl-adenosine
  modified_base 4: mod_base = um
  modified_base 5: mod_base = gm
  modified_base 6: mod_base = gm
  modified_base 7: mod_base = OTHER; note = 2'-O-methyl-adenosine
  modified_base 8: mod_base = um
  modified_base 9: mod_base = OTHER; note = 2'-Fluoro-guanosine
  modified_base 10: mod_base = OTHER; note = 2'-Fluoro-adenosine
  modified_base 11: mod_base = OTHER; note = 2'-Fluoro-uridine
  modified_base 12: mod_base = OTHER; note = 2'-O-methyl-adenosine
  modified_base 13: mod_base = OTHER; note = 2'-O-methyl-adenosine
  modified_base 14: mod_base = OTHER; note = 2'-O-methyl-adenosine
  modified_base 15: mod_base = gm
  modified_base 16: mod_base = OTHER; note = 2'-O-methyl-adenosine
  modified_base 17: mod_base = cm
  modified_base 18: mod_base = um
  modified_base 19: mod_base = OTHER; note = 2'-O-methyl-adenosine
  modified_base 20: mod_base = um
  modified_base 21: mod_base = um
ttatggatgataaagactatt

SEQ ID NO: 931 - RNA, 21 nt, synthetic construct
  source 1..21: mol_type = other RNA
  modified_base <1: mod_base = OTHER; note = two inverted abasic nucleosides
  modified_base 1: mod_base = gm
  modified_base 1^2: mod_base = OTHER; note = Phosphorothioate bond
  modified_base 2: mod_base = OTHER; note = 2'-O-methyl-adenosine
  modified_base 2^3: mod_base = OTHER; note = Phosphorothioate bond
  modified_base 3: mod_base = gm
  modified_base 4: mod_base = gm
  modified_base 5: mod_base = OTHER; note = 2'-O-methyl-adenosine
  modified_base 6: mod_base = OTHER; note = 2'-O-methyl-adenosine
  modified_base 7: mod_base = OTHER; note = 2'-O-methyl-adenosine
  modified_base 8: mod_base = um
  modified_base 9: mod_base = OTHER; note = 2'-Fluoro-adenosine
  modified_base 10: mod_base = OTHER; note = 2'-Fluoro-guanosine
  modified_base 11: mod_base = OTHER; note = 2'-Fluoro-cytidine
  modified_base 12: mod_base = OTHER; note = 2'-O-methyl-adenosine
  modified_base 13: mod_base = OTHER; note = 2'-O-methyl-adenosine
  modified_base 14: mod_base = OTHER; note = 2'-O-methyl-adenosine
  modified_base 15: mod_base = OTHER; note = 2'-O-methyl-adenosine
  modified_base 16: mod_base = um
  modified_base 17: mod_base = OTHER; note = 2'-O-methyl-adenosine
  modified_base 18: mod_base = OTHER; note = 2'-O-methyl-adenosine
  modified_base 19: mod_base = OTHER; note = 2'-O-methyl-adenosine
  modified_base 20: mod_base = um
  modified_base 21: mod_base = um
gaggaaatagcaaaataaatt

SEQ ID NO: 932 - RNA, 21 nt, synthetic construct
  source 1..21: mol_type = other RNA
  modified_base <1: mod_base = OTHER; note = two inverted abasic nucleosides
  modified_base 1: mod_base = um
  modified_base 1^2: mod_base = OTHER; note = Phosphorothioate bond
  modified_base 2: mod_base = gm
  modified_base 2^3: mod_base = OTHER; note = Phosphorothioate bond
  modified_base 3: mod_base = OTHER; note = 2'-O-methyl-adenosine
  modified_base 4: mod_base = um
  modified_base 5: mod_base = um
  modified_base 6: mod_base = gm
  modified_base 7: mod_base = cm
  modified_base 8: mod_base = OTHER; note = 2'-O-methyl-adenosine
  modified_base 9: mod_base = OTHER; note = 2'-Fluoro-uridine
  modified_base 10: mod_base = OTHER; note = 2'-Fluoro-cytidine
  modified_base 11: mod_base = OTHER; note = 2'-Fluoro-adenosine
  modified_base 12: mod_base = um
  modified_base 13: mod_base = um
  modified_base 14: mod_base = gm
  modified_base 15: mod_base = OTHER; note = 2'-O-methyl-adenosine
  modified_base 16: mod_base = um
  modified_base 17: mod_base = OTHER; note = 2'-O-methyl-adenosine
  modified_base 18: mod_base = OTHER; note = 2'-O-methyl-adenosine
  modified_base 19: mod_base = gm
  modified_base 20: mod_base = OTHER; note = 2'-O-methyl-adenosine
  modified_base 21: mod_base = um
tgattgcatcattgataagat

SEQ ID NO: 933 - RNA, 21 nt, synthetic construct
  source 1..21: mol_type = other RNA
  modified_base <1: mod_base = OTHER; note = two inverted abasic nucleosides
  modified_base 1: mod_base = um
  modified_base 1^2: mod_base = OTHER; note = Phosphorothioate bond
  modified_base 2: mod_base = cm
  modified_base 2^3: mod_base = OTHER; note = Phosphorothioate bond
  modified_base 3: mod_base = OTHER; note = 2'-O-methyl-adenosine
  modified_base 4: mod_base = um
  modified_base 5: mod_base = gm
  modified_base 6: mod_base = OTHER; note = 2'-O-methyl-adenosine
  modified_base 7: mod_base = OTHER; note = 2'-O-methyl-adenosine
  modified_base 8: mod_base = OTHER; note = 2'-O-methyl-adenosine
  modified_base 9: mod_base = OTHER; note = 2'-Fluoro-guanosine
  modified_base 10: mod_base = OTHER; note = 2'-Fluoro-uridine
  modified_base 11: mod_base = OTHER; note = 2'-Fluoro-uridine
  modified_base 12: mod_base = um
  modified_base 13: mod_base = um
  modified_base 14: mod_base = gm
  modified_base 15: mod_base = cm
  modified_base 16: mod_base = um
  modified_base 17: mod_base = gm
  modified_base 18: mod_base = cm
  modified_base 19: mod_base = um
  modified_base 20: mod_base = OTHER; note = 2'-O-methyl-adenosine
  modified_base 21: mod_base = cm
tcatgaaagttttgctgctac

SEQ ID NO: 934 - RNA, 21 nt, synthetic construct
  source 1..21: mol_type = other RNA
  modified_base <1: mod_base = OTHER; note = two inverted abasic nucleosides
  modified_base 1: mod_base = um
  modified_base 1^2: mod_base = OTHER; note = Phosphorothioate bond
  modified_base 2: mod_base = OTHER; note = 2'-O-methyl-adenosine
  modified_base 2^3: mod_base = OTHER; note = Phosphorothioate bond
  modified_base 3: mod_base = um
  modified_base 4: mod_base = gm
  modified_base 5: mod_base = um
  modified_base 6: mod_base = gm
  modified_base 7: mod_base = cm
  modified_base 8: mod_base = um
  modified_base 9: mod_base = OTHER; note = 2'-Fluoro-guanosine
  modified_base 10: mod_base = OTHER; note = 2'-Fluoro-guanosine
  modified_base 11: mod_base = OTHER; note = 2'-Fluoro-adenosine
  modified_base 12: mod_base = OTHER; note = 2'-O-methyl-adenosine
  modified_base 13: mod_base = gm
  modified_base 14: mod_base = OTHER; note = 2'-O-methyl-adenosine
  modified_base 15: mod_base = OTHER; note = 2'-O-methyl-adenosine
  modified_base 16: mod_base = OTHER; note = 2'-O-methyl-adenosine
  modified_base 17: mod_base = um
  modified_base 18: mod_base = gm
  modified_base 19: mod_base = OTHER; note = 2'-O-methyl-adenosine
  modified_base 20: mod_base = um
  modified_base 21: mod_base = um
tatgtgctggaagaaatgatt

SEQ ID NO: 935 - RNA, 21 nt, synthetic construct
  source 1..21: mol_type = other RNA
  modified_base <1: mod_base = OTHER; note = two inverted abasic nucleosides
  modified_base 1: mod_base = OTHER; note = 2'-O-methyl-adenosine
  modified_base 1^2: mod_base = OTHER; note = Phosphorothioate bond
  modified_base 2: mod_base = gm
  modified_base 2^3: mod_base = OTHER; note = Phosphorothioate bond
  modified_base 3: mod_base = OTHER; note = 2'-O-methyl-adenosine
  modified_base 4: mod_base = gm
  modified_base 5: mod_base = OTHER; note = 2'-O-methyl-adenosine
  modified_base 6: mod_base = um
  modified_base 7: mod_base = gm
  modified_base 8: mod_base = cm
  modified_base 9: mod_base = OTHER; note = 2'-Fluoro-uridine
  modified_base 10: mod_base = OTHER; note = 2'-Fluoro-guanosine
  modified_base 11: mod_base = OTHER; note = 2'-Fluoro-adenosine
  modified_base 12: mod_base = cm
  modified_base 13: mod_base = um
  modified_base 14: mod_base = OTHER; note = 2'-O-methyl-adenosine
  modified_base 15: mod_base = um
  modified_base 16: mod_base = um
  modified_base 17: mod_base = cm
  modified_base 18: mod_base = cm
  modified_base 19: mod_base = um
  modified_base 20: mod_base = OTHER; note = 2'-O-methyl-adenosine
  modified_base 21: mod_base = um
agagatgctgactattcctat

SEQ ID NO: 936 - RNA, 21 nt, synthetic construct
  source 1..21: mol_type = other RNA
  modified_base <1: mod_base = OTHER; note = two inverted abasic nucleosides
  modified_base 1: mod_base = um
  modified_base 1^2: mod_base = OTHER; note = Phosphorothioate bond
  modified_base 2: mod_base = gm
  modified_base 2^3: mod_base = OTHER; note = Phosphorothioate bond
  modified_base 3: mod_base = cm
  modified_base 4: mod_base = um
  modified_base 5: mod_base = gm
  modified_base 6: mod_base = gm
  modified_base 7: mod_base = OTHER; note = 2'-O-methyl-adenosine
  modified_base 8: mod_base = OTHER; note = 2'-O-methyl-adenosine
  modified_base 9: mod_base = OTHER; note = 2'-Fluoro-uridine
  modified_base 10: mod_base = OTHER; note = 2'-Fluoro-uridine
  modified_base 11: mod_base = OTHER; note = 2'-Fluoro-cytidine
  modified_base 12: mod_base = um
  modified_base 13: mod_base = gm
  modified_base 14: mod_base = cm
  modified_base 15: mod_base = um
  modified_base 16: mod_base = um
  modified_base 17: mod_base = cm
  modified_base 18: mod_base = um
  modified_base 19: mod_base = OTHER; note = 2'-O-methyl-adenosine
  modified_base 20: mod_base = cm
  modified_base 21: mod_base = OTHER; note = 2'-O-methyl-adenosine
tgctggaattctgcttctaca

SEQ ID NO: 937 - RNA, 21 nt, synthetic construct
  source 1..21: mol_type = other RNA
  modified_base <1: mod_base = OTHER; note = two inverted abasic nucleosides
  modified_base 1: mod_base = gm
  modified_base 1^2: mod_base = OTHER; note = Phosphorothioate bond
  modified_base 2: mod_base = um
  modified_base 2^3: mod_base = OTHER; note = Phosphorothioate bond
  modified_base 3: mod_base = OTHER; note = 2'-O-methyl-adenosine
  modified_base 4: mod_base = OTHER; note = 2'-O-methyl-adenosine
  modified_base 5: mod_base = gm
  modified_base 6: mod_base = OTHER; note = 2'-O-methyl-adenosine
  modified_base 7: mod_base = gm
  modified_base 8: mod_base = OTHER; note = 2'-O-methyl-adenosine
  modified_base 9: mod_base = OTHER; note = 2'-Fluoro-uridine
  modified_base 10: mod_base = OTHER; note = 2'-Fluoro-guanosine
  modified_base 11: mod_base = OTHER; note = 2'-Fluoro-cytidine
  modified_base 12: mod_base = um
  modified_base 13: mod_base = gm
  modified_base 14: mod_base = OTHER; note = 2'-O-methyl-adenosine
  modified_base 15: mod_base = cm
  modified_base 16: mod_base = um
  modified_base 17: mod_base = OTHER; note = 2'-O-methyl-adenosine
  modified_base 18: mod_base = um
  modified_base 19: mod_base = um
  modified_base 20: mod_base = cm
  modified_base 21: mod_base = cm
gtaagagatgctgactattcc

SEQ ID NO: 938 - RNA, 21 nt, synthetic construct
  source 1..21: mol_type = other RNA
  modified_base <1: mod_base = OTHER; note = two inverted abasic nucleosides
  modified_base 1: mod_base = um
  modified_base 1^2: mod_base = OTHER; note = Phosphorothioate bond
  modified_base 2: mod_base = OTHER; note = 2'-O-methyl-adenosine
  modified_base 2^3: mod_base = OTHER; note = Phosphorothioate bond
  modified_base 3: mod_base = gm
  modified_base 4: mod_base = gm
  modified_base 5: mod_base = OTHER; note = 2'-O-methyl-adenosine
  modified_base 6: mod_base = gm
  modified_base 7: mod_base = gm
  modified_base 8: mod_base = OTHER; note = 2'-O-methyl-adenosine
  modified_base 9: mod_base = OTHER; note = 2'-Fluoro-adenosine
  modified_base 10: mod_base = OTHER; note = 2'-Fluoro-adenosine
  modified_base 11: mod_base = OTHER; note = 2'-Fluoro-uridine
  modified_base 12: mod_base = OTHER; note = 2'-O-methyl-adenosine
  modified_base 13: mod_base = gm
  modified_base 14: mod_base = cm
  modified_base 15: mod_base = OTHER; note = 2'-O-methyl-adenosine
  modified_base 16: mod_base = OTHER; note = 2'-O-methyl-adenosine
  modified_base 17: mod_base = OTHER; note = 2'-O-methyl-adenosine
  modified_base 18: mod_base = OTHER; note = 2'-O-methyl-adenosine
  modified_base 19: mod_base = um
  modified_base 20: mod_base = OTHER; note = 2'-O-methyl-adenosine
  modified_base 21: mod_base = OTHER; note = 2'-O-methyl-adenosine
taggaggaaatagcaaaataa

SEQ ID NO: 939 - RNA, 21 nt, synthetic construct
  source 1..21: mol_type = other RNA
  modified_base <1: mod_base = OTHER; note = two inverted abasic nucleosides
  modified_base 1: mod_base = cm
  modified_base 1^2: mod_base = OTHER; note = Phosphorothioate bond
  modified_base 2: mod_base = OTHER; note = 2'-O-methyl-adenosine
  modified_base 2^3: mod_base = OTHER; note = Phosphorothioate bond
  modified_base 3: mod_base = cm
  modified_base 4: mod_base = cm
  modified_base 5: mod_base = OTHER; note = 2'-O-methyl-adenosine
  modified_base 6: mod_base = um
  modified_base 7: mod_base = cm
  modified_base 8: mod_base = OTHER; note = 2'-O-methyl-adenosine
  modified_base 9: mod_base = OTHER; note = 2'-Fluoro-uridine
  modified_base 10: mod_base = OTHER; note = 2'-Fluoro-guanosine
  modified_base 11: mod_base = OTHER; note = 2'-Fluoro-adenosine
  modified_base 12: mod_base = OTHER; note = 2'-O-methyl-adenosine
  modified_base 13: mod_base = OTHER; note = 2'-O-methyl-adenosine
  modified_base 14: mod_base = gm
  modified_base 15: mod_base = um
  modified_base 16: mod_base = um
  modified_base 17: mod_base = um
  modified_base 18: mod_base = um
  modified_base 19: mod_base = gm
  modified_base 20: mod_base = cm
  modified_base 21: mod_base = um
caccatcatgaaagttttgct

SEQ ID NO: 940 - RNA, 21 nt, synthetic construct
  source 1..21: mol_type = other RNA
  modified_base <1: mod_base = OTHER; note = two inverted abasic nucleosides
  modified_base 1: mod_base = um
  modified_base 1^2: mod_base = OTHER; note = Phosphorothioate bond
  modified_base 2: mod_base = OTHER; note = 2'-O-methyl-adenosine
  modified_base 2^3: mod_base = OTHER; note = Phosphorothioate bond
  modified_base 3: mod_base = um
  modified_base 4: mod_base = cm
  modified_base 5: mod_base = cm
  modified_base 6: mod_base = gm
  modified_base 7: mod_base = gm
  modified_base 8: mod_base = um
  modified_base 9: mod_base = OTHER; note = 2'-Fluoro-cytidine
  modified_base 10: mod_base = OTHER; note = 2'-Fluoro-uridine
  modified_base 11: mod_base = OTHER; note = 2'-Fluoro-uridine
  modified_base 12: mod_base = OTHER; note = 2'-O-methyl-adenosine
  modified_base 13: mod_base = gm
  modified_base 14: mod_base = OTHER; note = 2'-O-methyl-adenosine
  modified_base 15: mod_base = OTHER; note = 2'-O-methyl-adenosine
  modified_base 16: mod_base = um
  modified_base 17: mod_base = OTHER; note = 2'-O-methyl-adenosine
  modified_base 18: mod_base = cm
  modified_base 19: mod_base = OTHER; note = 2'-O-methyl-adenosine
  modified_base 20: mod_base = um
  modified_base 21: mod_base = um
tatccggtcttagaatacatt

SEQ ID NO: 941 - RNA, 21 nt, synthetic construct
  source 1..21: mol_type = other RNA
  modified_base <1: mod_base = OTHER; note = two inverted abasic nucleosides
  modified_base 1: mod_base = gm
  modified_base 1^2: mod_base = OTHER; note = Phosphorothioate bond
  modified_base 2: mod_base = um
  modified_base 2^3: mod_base = OTHER; note = Phosphorothioate bond
  modified_base 3: mod_base = cm
  modified_base 4: mod_base = cm
  modified_base 5: mod_base = gm
  modified_base 6: mod_base = um
  modified_base 7: mod_base = um
  modified_base 8: mod_base = OTHER; note = 2'-O-methyl-adenosine
  modified_base 9: mod_base = OTHER; note = 2'-Fluoro-adenosine
  modified_base 10: mod_base = OTHER; note = 2'-Fluoro-guanosine
  modified_base 11: mod_base = OTHER; note = 2'-Fluoro-uridine
  modified_base 12: mod_base = OTHER; note = 2'-O-methyl-adenosine
  modified_base 13: mod_base = gm
  modified_base 14: mod_base = cm
  modified_base 15: mod_base = OTHER; note = 2'-O-methyl-adenosine
  modified_base 16: mod_base = um
  modified_base 17: mod_base = gm
  modified_base 18: mod_base = OTHER; note = 2'-O-methyl-adenosine
  modified_base 19: mod_base = OTHER; note = 2'-O-methyl-adenosine
  modified_base 20: mod_base = OTHER; note = 2'-O-methyl-adenosine
  modified_base 21: mod_base = um
gtccgttaagtagcatgaaat

SEQ ID NO: 942 - RNA, 21 nt, synthetic construct
  source 1..21: mol_type = other RNA
  modified_base <1: mod_base = OTHER; note = two inverted abasic nucleosides
  modified_base 1: mod_base = um
  modified_base 1^2: mod_base = OTHER; note = Phosphorothioate bond
  modified_base 2: mod_base = cm
  modified_base 2^3: mod_base = OTHER; note = Phosphorothioate bond
  modified_base 3: mod_base = OTHER; note = 2'-O-methyl-adenosine
  modified_base 4: mod_base = cm
  modified_base 5: mod_base = um
  modified_base 6: mod_base = gm
  modified_base 7: mod_base = cm
  modified_base 8: mod_base = OTHER; note = 2'-O-methyl-adenosine
  modified_base 9: mod_base = OTHER; note = 2'-Fluoro-guanosine
  modified_base 10: mod_base = OTHER; note = 2'-Fluoro-uridine
  modified_base 11: mod_base = OTHER; note = 2'-Fluoro-guanosine
  modified_base 12: mod_base = um
  modified_base 13: mod_base = OTHER; note = 2'-O-methyl-adenosine
  modified_base 14: mod_base = OTHER; note = 2'-O-methyl-adenosine
  modified_base 15: mod_base = OTHER; note = 2'-O-methyl-adenosine
  modified_base 16: mod_base = OTHER; note = 2'-O-methyl-adenosine
  modified_base 17: mod_base = um
  modified_base 18: mod_base = cm
  modified_base 19: mod_base = um
  modified_base 20: mod_base = cm
  modified_base 21: mod_base = cm
tcactgcagtgtaaaatctcc

SEQ ID NO: 943 - RNA, 21 nt, synthetic construct
  source 1..21: mol_type = other RNA
  modified_base <1: mod_base = OTHER; note = two inverted abasic nucleosides
  modified_base 1: mod_base = cm
  modified_base 1^2: mod_base = OTHER; note = Phosphorothioate bond
  modified_base 2: mod_base = um
  modified_base 2^3: mod_base = OTHER; note = Phosphorothioate bond
  modified_base 3: mod_base = gm
  modified_base 4: mod_base = um
  modified_base 5: mod_base = OTHER; note = 2'-O-methyl-adenosine
  modified_base 6: mod_base = OTHER; note = 2'-O-methyl-adenosine
  modified_base 7: mod_base = gm
  modified_base 8: mod_base = OTHER; note = 2'-O-methyl-adenosine
  modified_base 9: mod_base = OTHER; note = 2'-Fluoro-guanosine
  modified_base 10: mod_base = OTHER; note = 2'-Fluoro-adenosine
  modified_base 11: mod_base = OTHER; note = 2'-Fluoro-uridine
  modified_base 12: mod_base = gm
  modified_base 13: mod_base = cm
  modified_base 14: mod_base = um
  modified_base 15: mod_base = gm
  modified_base 16: mod_base = OTHER; note = 2'-O-methyl-adenosine
  modified_base 17: mod_base = cm
  modified_base 18: mod_base = um
  modified_base 19: mod_base = OTHER; note = 2'-O-methyl-adenosine
  modified_base 20: mod_base = um
  modified_base 21: mod_base = um
ctgtaagagatgctgactatt

SEQ ID NO: 944 - RNA, 21 nt, synthetic construct
  source 1..21: mol_type = other RNA
  modified_base <1: mod_base = OTHER; note = two inverted abasic nucleosides
  modified_base 1: mod_base = cm
  modified_base 1^2: mod_base = OTHER; note = Phosphorothioate bond
  modified_base 2: mod_base = um
  modified_base 2^3: mod_base = OTHER; note = Phosphorothioate bond
  modified_base 3: mod_base = um
  modified_base 4: mod_base = um
  modified_base 5: mod_base = OTHER; note = 2'-O-methyl-adenosine
  modified_base 6: mod_base = um
  modified_base 7: mod_base = gm
  modified_base 8: mod_base = gm
  modified_base 9: mod_base = OTHER; note = 2'-Fluoro-adenosine
  modified_base 10: mod_base = OTHER; note = 2'-Fluoro-uridine
  modified_base 11: mod_base = OTHER; note = 2'-Fluoro-guanosine
  modified_base 12: mod_base = OTHER; note = 2'-O-methyl-adenosine
  modified_base 13: mod_base = um
  modified_base 14: mod_base = OTHER; note = 2'-O-methyl-adenosine
  modified_base 15: mod_base = OTHER; note = 2'-O-methyl-adenosine
  modified_base 16: mod_base = OTHER; note = 2'-O-methyl-adenosine
  modified_base 17: mod_base = gm
  modified_base 18: mod_base = OTHER; note = 2'-O-methyl-adenosine
  modified_base 19: mod_base = cm
  modified_base 20: mod_base = um
  modified_base 21: mod_base = OTHER; note = 2'-O-methyl-adenosine
ctttatggatgataaagacta

SEQ ID NO: 945 - RNA, 21 nt, synthetic construct
  source 1..21: mol_type = other RNA
  modified_base <1: mod_base = OTHER; note = two inverted abasic nucleosides
  modified_base 1: mod_base = gm
  modified_base 1^2: mod_base = OTHER; note = Phosphorothioate bond
  modified_base 2: mod_base = gm
  modified_base 2^3: mod_base = OTHER; note = Phosphorothioate bond
  modified_base 3: mod_base = gm
  modified_base 4: mod_base = um
  modified_base 5: mod_base = um
  modified_base 6: mod_base = um
  modified_base 7: mod_base = OTHER; note = 2'-O-methyl-adenosine
  modified_base 8: mod_base = um
  modified_base 9: mod_base = OTHER; note = 2'-Fluoro-adenosine
  modified_base 10: mod_base = OTHER; note = 2'-Fluoro-uridine
  modified_base 11: mod_base = OTHER; note = 2'-Fluoro-adenosine
  modified_base 12: mod_base = um
  modified_base 13: mod_base = gm
  modified_base 14: mod_base = gm
  modified_base 15: mod_base = OTHER; note = 2'-O-methyl-adenosine
  modified_base 16: mod_base = um
  modified_base 17: mod_base = um
  modified_base 18: mod_base = cm
  modified_base 19: mod_base = um
  modified_base 20: mod_base = gm
  modified_base 21: mod_base = um
gggtttatatatggattctgt

SEQ ID NO: 946 - RNA, 21 nt, synthetic construct
  source 1..21: mol_type = other RNA
  modified_base <1: mod_base = OTHER; note = two inverted abasic nucleosides
  modified_base 1: mod_base = um
  modified_base 1^2: mod_base = OTHER; note = Phosphorothioate bond
  modified_base 2: mod_base = cm
  modified_base 2^3: mod_base = OTHER; note = Phosphorothioate bond
  modified_base 3: mod_base = um
  modified_base 4: mod_base = cm
  modified_base 5: mod_base = OTHER; note = 2'-O-methyl-adenosine
  modified_base 6: mod_base = OTHER; note = 2'-O-methyl-adenosine
  modified_base 7: mod_base = gm
  modified_base 8: mod_base = um
  modified_base 9: mod_base = OTHER; note = 2'-Fluoro-cytidine
  modified_base 10: mod_base = OTHER; note = 2'-Fluoro-cytidine
  modified_base 11: mod_base = OTHER; note = 2'-Fluoro-guanosine
  modified_base 12: mod_base = um
  modified_base 13: mod_base = um
  modified_base 14: mod_base = OTHER; note = 2'-O-methyl-adenosine
  modified_base 15: mod_base = OTHER; note = 2'-O-methyl-adenosine
  modified_base 16: mod_base = gm
  modified_base 17: mod_base = um
  modified_base 18: mod_base = OTHER; note = 2'-O-methyl-adenosine
  modified_base 19: mod_base = gm
  modified_base 20: mod_base = cm
  modified_base 21: mod_base = OTHER; note = 2'-O-methyl-adenosine
tctcaagtccgttaagtagca

SEQ ID NO: 947 - RNA, 21 nt, synthetic construct
  source 1..21: mol_type = other RNA
  modified_base <1: mod_base = OTHER; note = two inverted abasic nucleosides
  modified_base 1: mod_base = cm
  modified_base 1^2: mod_base = OTHER; note = Phosphorothioate bond
  modified_base 2: mod_base = cm
  modified_base 2^3: mod_base = OTHER; note = Phosphorothioate bond
  modified_base 3: mod_base = cm
  modified_base 4: mod_base = um
  modified_base 5: mod_base = cm
  modified_base 6: mod_base = um
  modified_base 7: mod_base = gm
  modified_base 8: mod_base = OTHER; note = 2'-O-methyl-adenosine
  modified_base 9: mod_base = OTHER; note = 2'-Fluoro-adenosine
  modified_base 10: mod_base = OTHER; note = 2'-Fluoro-cytidine
  modified_base 11: mod_base = OTHER; note = 2'-Fluoro-adenosine
  modified_base 12: mod_base = um
  modified_base 13: mod_base = gm
  modified_base 14: mod_base = OTHER; note = 2'-O-methyl-adenosine
  modified_base 15: mod_base = cm
  modified_base 16: mod_base = OTHER; note = 2'-O-methyl-adenosine
  modified_base 17: mod_base = um
  modified_base 18: mod_base = cm
  modified_base 19: mod_base = um
  modified_base 20: mod_base = um
  modified_base 21: mod_base = cm
ccctctgaacatgacatcttc

SEQ ID NO: 948 - RNA, 21 nt, synthetic construct
  source 1..21: mol_type = other RNA
  modified_base <1: mod_base = OTHER; note = two inverted abasic nucleosides
  modified_base 1: mod_base = OTHER; note = 2'-O-methyl-adenosine
  modified_base 1^2: mod_base = OTHER; note = Phosphorothioate bond
  modified_base 2: mod_base = OTHER; note = 2'-O-methyl-adenosine
  modified_base 2^3: mod_base = OTHER; note = Phosphorothioate bond
  modified_base 3: mod_base = gm
  modified_base 4: mod_base = gm
  modified_base 5: mod_base = OTHER; note = 2'-O-methyl-adenosine
  modified_base 6: mod_base = OTHER; note = 2'-O-methyl-adenosine
  modified_base 7: mod_base = cm
  modified_base 8: mod_base = um
  modified_base 9: mod_base = OTHER; note = 2'-Fluoro-uridine
  modified_base 10: mod_base = OTHER; note = 2'-Fluoro-uridine
  modified_base 11: mod_base = OTHER; note = 2'-Fluoro-cytidine
  modified_base 12: mod_base = OTHER; note = 2'-O-methyl-adenosine
  modified_base 13: mod_base = gm
  modified_base 14: mod_base = cm
  modified_base 15: mod_base = OTHER; note = 2'-O-methyl-adenosine
  modified_base 16: mod_base = OTHER; note = 2'-O-methyl-adenosine
  modified_base 17: mod_base = cm
  modified_base 18: mod_base = um
  modified_base 19: mod_base = gm
  modified_base 20: mod_base = um
  modified_base 21: mod_base = OTHER; note = 2'-O-methyl-adenosine
aaggaactttcagcaactgta

SEQ ID NO: 949 - RNA, 21 nt, synthetic construct
  source 1..21: mol_type = other RNA
  modified_base <1: mod_base = OTHER; note = two inverted abasic nucleosides
  modified_base 1: mod_base = um
  modified_base 1^2: mod_base = OTHER; note = Phosphorothioate bond
  modified_base 2: mod_base = cm
  modified_base 2^3: mod_base = OTHER; note = Phosphorothioate bond
  modified_base 3: mod_base = um
  modified_base 4: mod_base = gm
  modified_base 5: mod_base = um
  modified_base 6: mod_base = OTHER; note = 2'-O-methyl-adenosine
  modified_base 7: mod_base = OTHER; note = 2'-O-methyl-adenosine
  modified_base 8: mod_base = gm
  modified_base 9: mod_base = OTHER; note = 2'-Fluoro-adenosine
  modified_base 10: mod_base = OTHER; note = 2'-Fluoro-guanosine
  modified_base 11: mod_base = OTHER; note = 2'-Fluoro-adenosine
  modified_base 12: mod_base = um
  modified_base 13: mod_base = gm
  modified_base 14: mod_base = cm
  modified_base 15: mod_base = um
  modified_base 16: mod_base = gm
  modified_base 17: mod_base = OTHER; note = 2'-O-methyl-adenosine
  modified_base 18: mod_base = cm
  modified_base 19: mod_base = um
  modified_base 20: mod_base = OTHER; note = 2'-O-methyl-adenosine
  modified_base 21: mod_base = um
tctgtaagagatgctgactat

SEQ ID NO: 950 - RNA, 21 nt, synthetic construct
  source 1..21: mol_type = other RNA
  modified_base <1: mod_base = OTHER; note = two inverted abasic nucleosides
  modified_base 1: mod_base = gm
  modified_base 1^2: mod_base = OTHER; note = Phosphorothioate bond
  modified_base 2: mod_base = gm
  modified_base 2^3: mod_base = OTHER; note = Phosphorothioate bond
  modified_base 3: mod_base = um
  modified_base 4: mod_base = gm
  modified_base 5: mod_base = OTHER; note = 2'-O-methyl-adenosine
  modified_base 6: mod_base = OTHER; note = 2'-O-methyl-adenosine
  modified_base 7: mod_base = OTHER; note = 2'-O-methyl-adenosine
  modified_base 8: mod_base = um
  modified_base 9: mod_base = OTHER; note = 2'-Fluoro-uridine
  modified_base 10: mod_base = OTHER; note = 2'-Fluoro-uridine
  modified_base 11: mod_base = OTHER; note = 2'-Fluoro-uridine
  modified_base 12: mod_base = OTHER; note = 2'-O-methyl-adenosine
  modified_base 13: mod_base = cm
  modified_base 14: mod_base = OTHER; note = 2'-O-methyl-adenosine
  modified_base 15: mod_base = OTHER; note = 2'-O-methyl-adenosine
  modified_base 16: mod_base = OTHER; note = 2'-O-methyl-adenosine
  modified_base 17: mod_base = gm
  modified_base 18: mod_base = gm
  modified_base 19: mod_base = OTHER; note = 2'-O-methyl-adenosine
  modified_base 20: mod_base = OTHER; note = 2'-O-methyl-adenosine
  modified_base 21: mod_base = OTHER; note = 2'-O-methyl-adenosine
ggtgaaattttacaaaggaaa

SEQ ID NO: 951 - RNA, 21 nt, synthetic construct
  source 1..21: mol_type = other RNA
  modified_base <1: mod_base = OTHER; note = two inverted abasic nucleosides
  modified_base 1: mod_base = um
  modified_base 1^2: mod_base = OTHER; note = Phosphorothioate bond
  modified_base 2: mod_base = cm
  modified_base 2^3: mod_base = OTHER; note = Phosphorothioate bond
  modified_base 3: mod_base = um
  modified_base 4: mod_base = OTHER; note = 2'-O-methyl-adenosine
  modified_base 5: mod_base = OTHER; note = 2'-O-methyl-adenosine
  modified_base 6: mod_base = gm
  modified_base 7: mod_base = gm
  modified_base 8: mod_base = OTHER; note = 2'-O-methyl-adenosine
  modified_base 9: mod_base = OTHER; note = 2'-Fluoro-adenosine
  modified_base 10: mod_base = OTHER; note = 2'-Fluoro-cytidine
  modified_base 11: mod_base = OTHER; note = 2'-Fluoro-uridine
  modified_base 12: mod_base = um
  modified_base 13: mod_base = um
  modified_base 14: mod_base = cm
  modified_base 15: mod_base = OTHER; note = 2'-O-methyl-adenosine
  modified_base 16: mod_base = gm
  modified_base 17: mod_base = cm
  modified_base 18: mod_base = OTHER; note = 2'-O-methyl-adenosine
  modified_base 19: mod_base = OTHER; note = 2'-O-methyl-adenosine
  modified_base 20: mod_base = cm
  modified_base 21: mod_base = um
tctaaggaactttcagcaact

SEQ ID NO: 952 - RNA, 21 nt, synthetic construct
  source 1..21: mol_type = other RNA
  modified_base <1: mod_base = OTHER; note = two inverted abasic nucleosides
  modified_base 1: mod_base = OTHER; note = 2'-O-methyl-adenosine
  modified_base 1^2: mod_base = OTHER; note = Phosphorothioate bond
  modified_base 2: mod_base = gm
  modified_base 2^3: mod_base = OTHER; note = Phosphorothioate bond
  modified_base 3: mod_base = OTHER; note = 2'-O-methyl-adenosine
  modified_base 4: mod_base = OTHER; note = 2'-O-methyl-adenosine
  modified_base 5: mod_base = OTHER; note = 2'-O-methyl-adenosine
  modified_base 6: mod_base = um
  modified_base 7: mod_base = gm
  modified_base 8: mod_base = OTHER; note = 2'-O-methyl-adenosine
  modified_base 9: mod_base = OTHER; note = 2'-Fluoro-guanosine
  modified_base 10: mod_base = OTHER; note = 2'-Fluoro-guanosine
  modified_base 11: mod_base = OTHER; note = 2'-Fluoro-adenosine
  modified_base 12: mod_base = cm
  modified_base 13: mod_base = OTHER; note = 2'-O-methyl-adenosine
  modified_base 14: mod_base = OTHER; note = 2'-O-methyl-adenosine
  modified_base 15: mod_base = OTHER; note = 2'-O-methyl-adenosine
  modified_base 16: mod_base = um
  modified_base 17: mod_base = um
  modified_base 18: mod_base = OTHER; note = 2'-O-methyl-adenosine
  modified_base 19: mod_base = cm
  modified_base 20: mod_base = OTHER; note = 2'-O-methyl-adenosine
  modified_base 21: mod_base = um
agaaatgaggacaaattacat

SEQ ID NO: 953 - RNA, 21 nt, synthetic construct
  source 1..21: mol_type = other RNA
  modified_base <1: mod_base = OTHER; note = two inverted abasic nucleosides
  modified_base 1: mod_base = um
  modified_base 1^2: mod_base = OTHER; note = Phosphorothioate bond
  modified_base 2: mod_base = OTHER; note = 2'-O-methyl-adenosine
  modified_base 2^3: mod_base = OTHER; note = Phosphorothioate bond
  modified_base 3: mod_base = cm
  modified_base 4: mod_base = cm
  modified_base 5: mod_base = OTHER; note = 2'-O-methyl-adenosine
  modified_base 6: mod_base = OTHER; note = 2'-O-methyl-adenosine
  modified_base 7: mod_base = um
  modified_base 8: mod_base = OTHER; note = 2'-O-methyl-adenosine
  modified_base 9: mod_base = OTHER; note = 2'-Fluoro-adenosine
  modified_base 10: mod_base = OTHER; note = 2'-Fluoro-adenosine
  modified_base 11: mod_base = OTHER; note = 2'-Fluoro-guanosine
  modified_base 12: mod_base = cm
  modified_base 13: mod_base = OTHER; note = 2'-O-methyl-adenosine
  modified_base 14: mod_base = OTHER; note = 2'-O-methyl-adenosine
  modified_base 15: mod_base = gm
  modified_base 16: mod_base = OTHER; note = 2'-O-methyl-adenosine
  modified_base 17: mod_base = OTHER; note = 2'-O-methyl-adenosine
  modified_base 18: mod_base = um
  modified_base 19: mod_base = cm
  modified_base 20: mod_base = OTHER; note = 2'-O-methyl-adenosine
  modified_base 21: mod_base = OTHER; note = 2'-O-methyl-adenosine
taccaataaagcaagaatcaa

SEQ ID NO: 954 - RNA, 21 nt, synthetic construct
  source 1..21: mol_type = other RNA
  modified_base <1: mod_base = OTHER; note = two inverted abasic nucleosides
  modified_base 1: mod_base = gm
  modified_base 1^2: mod_base = OTHER; note = Phosphorothioate bond
  modified_base 2: mod_base = um
  modified_base 2^3: mod_base = OTHER; note = Phosphorothioate bond
  modified_base 3: mod_base = cm
  modified_base 4: mod_base = um
  modified_base 5: mod_base = um
  modified_base 6: mod_base = cm
  modified_base 7: mod_base = OTHER; note = 2'-O-methyl-adenosine
  modified_base 8: mod_base = OTHER; note = 2'-O-methyl-adenosine
  modified_base 9: mod_base = OTHER; note = 2'-Fluoro-guanosine
  modified_base 10: mod_base = OTHER; note = 2'-Fluoro-cytidine
  modified_base 11: mod_base = OTHER; note = 2'-Fluoro-uridine
  modified_base 12: mod_base = gm
  modified_base 13: mod_base = gm
  modified_base 14: mod_base = OTHER; note = 2'-O-methyl-adenosine
  modified_base 15: mod_base = OTHER; note = 2'-O-methyl-adenosine
  modified_base 16: mod_base = um
  modified_base 17: mod_base = gm
  modified_base 18: mod_base = OTHER; note = 2'-O-methyl-adenosine
  modified_base 19: mod_base = OTHER; note = 2'-O-methyl-adenosine
  modified_base 20: mod_base = um
  modified_base 21: mod_base = um
gtcttcaagctggaatgaatt

SEQ ID NO: 955 - RNA, 21 nt, synthetic construct
  source 1..21: mol_type = other RNA
  modified_base <1: mod_base = OTHER; note = two inverted abasic nucleosides
  modified_base 1: mod_base = gm
  modified_base 1^2: mod_base = OTHER; note = Phosphorothioate bond
  modified_base 2: mod_base = cm
  modified_base 2^3: mod_base = OTHER; note = Phosphorothioate bond
  modified_base 3: mod_base = um
  modified_base 4: mod_base = um
  modified_base 5: mod_base = OTHER; note = 2'-O-methyl-adenosine
  modified_base 6: mod_base = OTHER; note = 2'-O-methyl-adenosine
  modified_base 7: mod_base = um
  modified_base 8: mod_base = OTHER; note = 2'-O-methyl-adenosine
  modified_base 9: mod_base = OTHER; note = 2'-Fluoro-uridine
  modified_base 10: mod_base = OTHER; note = 2'-Fluoro-uridine
  modified_base 11: mod_base = OTHER; note = 2'-Fluoro-guanosine
  modified_base 12: mod_base = um
  modified_base 13: mod_base = cm
  modified_base 14: mod_base = cm
  modified_base 15: mod_base = OTHER; note = 2'-O-methyl-adenosine
  modified_base 16: mod_base = gm
  modified_base 17: mod_base = um
  modified_base 18: mod_base = OTHER; note = 2'-O-methyl-adenosine
  modified_base 19: mod_base = cm
  modified_base 20: mod_base = OTHER; note = 2'-O-methyl-adenosine
  modified_base 21: mod_base = um
gcttaatattgtccagtacat

SEQ ID NO: 956 - RNA, 21 nt, synthetic construct
  source 1..21: mol_type = other RNA
  modified_base <1: mod_base = OTHER; note = two inverted abasic nucleosides
  modified_base 1: mod_base = gm
  modified_base 1^2: mod_base = OTHER; note = Phosphorothioate bond
  modified_base 2: mod_base = um
  modified_base 2^3: mod_base = OTHER; note = Phosphorothioate bond
  modified_base 3: mod_base = um
  modified_base 4: mod_base = um
  modified_base 5: mod_base = OTHER; note = 2'-O-methyl-adenosine
  modified_base 6: mod_base = um
  modified_base 7: mod_base = OTHER; note = 2'-O-methyl-adenosine
  modified_base 8: mod_base = um
  modified_base 9: mod_base = OTHER; note = 2'-Fluoro-adenosine
  modified_base 10: mod_base = OTHER; note = 2'-Fluoro-uridine
  modified_base 11: mod_base = OTHER; note = 2'-Fluoro-guanosine
  modified_base 12: mod_base = gm
  modified_base 13: mod_base = OTHER; note = 2'-O-methyl-adenosine
  modified_base 14: mod_base = um
  modified_base 15: mod_base = um
  modified_base 16: mod_base = cm
  modified_base 17: mod_base = um
  modified_base 18: mod_base = gm
  modified_base 19: mod_base = um
  modified_base 20: mod_base = OTHER; note = 2'-O-methyl-adenosine
  modified_base 21: mod_base = OTHER; note = 2'-O-methyl-adenosine
gtttatatatggattctgtaa

SEQ ID NO: 957 - RNA, 21 nt, synthetic construct
  source 1..21: mol_type = other RNA
  modified_base <1: mod_base = OTHER; note = two inverted abasic nucleosides
  modified_base 1: mod_base = cm
  modified_base 1^2: mod_base = OTHER; note = Phosphorothioate bond
  modified_base 2: mod_base = cm
  modified_base 2^3: mod_base = OTHER; note = Phosphorothioate bond
  modified_base 3: mod_base = OTHER; note = 2'-O-methyl-adenosine
  modified_base 4: mod_base = OTHER; note = 2'-O-methyl-adenosine
  modified_base 5: mod_base = gm
  modified_base 6: mod_base = um
  modified_base 7: mod_base = cm
  modified_base 8: mod_base = OTHER; note = 2'-O-methyl-adenosine
  modified_base 9: mod_base = OTHER; note = 2'-Fluoro-cytidine
  modified_base 10: mod_base = OTHER; note = 2'-Fluoro-uridine
  modified_base 11: mod_base = OTHER; note = 2'-Fluoro-guanosine
  modified_base 12: mod_base = cm
  modified_base 13: mod_base = OTHER; note = 2'-O-methyl-adenosine
  modified_base 14: mod_base = gm
  modified_base 15: mod_base = um
  modified_base 16: mod_base = gm
  modified_base 17: mod_base = um
  modified_base 18: mod_base = OTHER; note = 2'-O-methyl-adenosine
  modified_base 19: mod_base = OTHER; note = 2'-O-methyl-adenosine
  modified_base 20: mod_base = OTHER; note = 2'-O-methyl-adenosine
  modified_base 21: mod_base = OTHER; note = 2'-O-methyl-adenosine
ccaagtcactgcagtgtaaaa

SEQ ID NO: 958 - RNA, 21 nt, synthetic construct
  source 1..21: mol_type = other RNA
  modified_base <1: mod_base = OTHER; note = two inverted abasic nucleosides
  modified_base 1: mod_base = gm
  modified_base 1^2: mod_base = OTHER; note = Phosphorothioate bond
  modified_base 2: mod_base = OTHER; note = 2'-O-methyl-adenosine
  modified_base 2^3: mod_base = OTHER; note = Phosphorothioate bond
  modified_base 3: mod_base = um
  modified_base 4: mod_base = gm
  modified_base 5: mod_base = OTHER; note = 2'-O-methyl-adenosine
  modified_base 6: mod_base = um
  modified_base 7: mod_base = OTHER; note = 2'-O-methyl-adenosine
  modified_base 8: mod_base = OTHER; note = 2'-O-methyl-adenosine
  modified_base 9: mod_base = OTHER; note = 2'-Fluoro-adenosine
  modified_base 10: mod_base = OTHER; note = 2'-Fluoro-guanosine
  modified_base 11: mod_base = OTHER; note = 2'-Fluoro-adenosine
  modified_base 12: mod_base = cm
  modified_base 13: mod_base = um
  modified_base 14: mod_base = OTHER; note = 2'-O-methyl-adenosine
  modified_base 15: mod_base = um
  modified_base 16: mod_base = um
  modified_base 17: mod_base = OTHER; note = 2'-O-methyl-adenosine
  modified_base 18: mod_base = um
  modified_base 19: mod_base = um
  modified_base 20: mod_base = cm
  modified_base 21: mod_base = cm
gatgataaagactattattcc

SEQ ID NO: 959 - RNA, 21 nt, synthetic construct
  source 1..21: mol_type = other RNA
  modified_base <1: mod_base = OTHER; note = two inverted abasic nucleosides
  modified_base 1: mod_base = gm
  modified_base 1^2: mod_base = OTHER; note = Phosphorothioate bond
  modified_base 2: mod_base = OTHER; note = 2'-O-methyl-adenosine
  modified_base 2^3: mod_base = OTHER; note = Phosphorothioate bond
  modified_base 3: mod_base = um
  modified_base 4: mod_base = um
  modified_base 5: mod_base = gm
  modified_base 6: mod_base = cm
  modified_base 7: mod_base = OTHER; note = 2'-O-methyl-adenosine
  modified_base 8: mod_base = um
  modified_base 9: mod_base = OTHER; note = 2'-Fluoro-cytidine
  modified_base 10: mod_base = OTHER; note = 2'-Fluoro-adenosine
  modified_base 11: mod_base = OTHER; note = 2'-Fluoro-uridine
  modified_base 12: mod_base = um
  modified_base 13: mod_base = gm
  modified_base 14: mod_base = OTHER; note = 2'-O-methyl-adenosine
  modified_base 15: mod_base = um
  modified_base 16: mod_base = OTHER; note = 2'-O-methyl-adenosine
  modified_base 17: mod_base = OTHER; note = 2'-O-methyl-adenosine
  modified_base 18: mod_base = gm
  modified_base 19: mod_base = OTHER; note = 2'-O-methyl-adenosine
  modified_base 20: mod_base = um
  modified_base 21: mod_base = um
gattgcatcattgataagatt

SEQ ID NO: 960 - RNA, 21 nt, synthetic construct
  source 1..21: mol_type = other RNA
  modified_base <1: mod_base = OTHER; note = two inverted abasic nucleosides
  modified_base 1: mod_base = um
  modified_base 1^2: mod_base = OTHER; note = Phosphorothioate bond
  modified_base 2: mod_base = gm
  modified_base 2^3: mod_base = OTHER; note = Phosphorothioate bond
  modified_base 3: mod_base = gm
  modified_base 4: mod_base = um
  modified_base 5: mod_base = gm
  modified_base 6: mod_base = OTHER; note = 2'-O-methyl-adenosine
  modified_base 7: mod_base = OTHER; note = 2'-O-methyl-adenosine
  modified_base 8: mod_base = OTHER; note = 2'-O-methyl-adenosine
  modified_base 9: mod_base = OTHER; note = 2'-Fluoro-uridine
  modified_base 10: mod_base = OTHER; note = 2'-Fluoro-uridine
  modified_base 11: mod_base = OTHER; note = 2'-Fluoro-uridine
  modified_base 12: mod_base = um
  modified_base 13: mod_base = OTHER; note = 2'-O-methyl-adenosine
  modified_base 14: mod_base = cm
  modified_base 15: mod_base = OTHER; note = 2'-O-methyl-adenosine
  modified_base 16: mod_base = OTHER; note = 2'-O-methyl-adenosine
  modified_base 17: mod_base = OTHER; note = 2'-O-methyl-adenosine
  modified_base 18: mod_base = gm
  modified_base 19: mod_base = gm
  modified_base 20: mod_base = OTHER; note = 2'-O-methyl-adenosine
  modified_base 21: mod_base = OTHER; note = 2'-O-methyl-adenosine
tggtgaaattttacaaaggaa

SEQ ID NO: 961 - RNA, 21 nt, synthetic construct
  source 1..21: mol_type = other RNA
  modified_base <1: mod_base = OTHER; note = two inverted abasic nucleosides
  modified_base 1: mod_base = gm
  modified_base 1^2: mod_base = OTHER; note = Phosphorothioate bond
  modified_base 2: mod_base = OTHER; note = 2'-O-methyl-adenosine
  modified_base 2^3: mod_base = OTHER; note = Phosphorothioate bond
  modified_base 3: mod_base = cm
  modified_base 4: mod_base = OTHER; note = 2'-O-methyl-adenosine
  modified_base 5: mod_base = OTHER; note = 2'-O-methyl-adenosine
  modified_base 6: mod_base = OTHER; note = 2'-O-methyl-adenosine
  modified_base 7: mod_base = um
  modified_base 8: mod_base = um
  modified_base 9: mod_base = OTHER; note = 2'-Fluoro-adenosine
  modified_base 10: mod_base = OTHER; note = 2'-Fluoro-cytidine
  modified_base 11: mod_base = OTHER; note = 2'-Fluoro-adenosine
  modified_base 12: mod_base = um
  modified_base 13: mod_base = cm
  modified_base 14: mod_base = OTHER; note = 2'-O-methyl-adenosine
  modified_base 15: mod_base = OTHER; note = 2'-O-methyl-adenosine
  modified_base 16: mod_base = OTHER; note = 2'-O-methyl-adenosine
  modified_base 17: mod_base = gm
  modified_base 18: mod_base = OTHER; note = 2'-O-methyl-adenosine
  modified_base 19: mod_base = OTHER; note = 2'-O-methyl-adenosine
  modified_base 20: mod_base = cm
  modified_base 21: mod_base = um
gacaaattacatcaaagaact

SEQ ID NO: 962 - RNA, 21 nt, synthetic construct
  source 1..21: mol_type = other RNA
  modified_base <1: mod_base = OTHER; note = two inverted abasic nucleosides
  modified_base 1: mod_base = OTHER; note = 2'-O-methyl-adenosine
  modified_base 1^2: mod_base = OTHER; note = Phosphorothioate bond
  modified_base 2: mod_base = gm
  modified_base 2^3: mod_base = OTHER; note = Phosphorothioate bond
  modified_base 3: mod_base = um
  modified_base 4: mod_base = gm
  modified_base 5: mod_base = um
  modified_base 6: mod_base = OTHER; note = 2'-O-methyl-adenosine
  modified_base 7: mod_base = OTHER; note = 2'-O-methyl-adenosine
  modified_base 8: mod_base = OTHER; note = 2'-O-methyl-adenosine
  modified_base 9: mod_base = OTHER; note = 2'-Fluoro-adenosine
  modified_base 10: mod_base = OTHER; note = 2'-Fluoro-uridine
  modified_base 11: mod_base = OTHER; note = 2'-Fluoro-cytidine
  modified_base 12: mod_base = um
  modified_base 13: mod_base = cm
  modified_base 14: mod_base = cm
  modified_base 15: mod_base = OTHER; note = 2'-O-methyl-adenosine
  modified_base 16: mod_base = gm
  modified_base 17: mod_base = um
  modified_base 18: mod_base = cm
  modified_base 19: mod_base = um
  modified_base 20: mod_base = cm
  modified_base 21: mod_base = cm
agtgtaaaatctccagtctcc

SEQ ID NO: 963 - RNA, 21 nt, synthetic construct
  source 1..21: mol_type = other RNA
  modified_base <1: mod_base = OTHER; note = two inverted abasic nucleosides
  modified_base 1: mod_base = um
  modified_base 1^2: mod_base = OTHER; note = Phosphorothioate bond
  modified_base 2: mod_base = gm
  modified_base 2^3: mod_base = OTHER; note = Phosphorothioate bond
  modified_base 3: mod_base = OTHER; note = 2'-O-methyl-adenosine
  modified_base 4: mod_base = OTHER; note = 2'-O-methyl-adenosine
  modified_base 5: mod_base = OTHER; note = 2'-O-methyl-adenosine
  modified_base 6: mod_base = gm
  modified_base 7: mod_base = um
  modified_base 8: mod_base = um
  modified_base 9: mod_base = OTHER; note = 2'-Fluoro-uridine
  modified_base 10: mod_base = OTHER; note = 2'-Fluoro-uridine
  modified_base 11: mod_base = OTHER; note = 2'-Fluoro-guanosine
  modified_base 12: mod_base = cm
  modified_base 13: mod_base = um
  modified_base 14: mod_base = gm
  modified_base 15: mod_base = cm
  modified_base 16: mod_base = um
  modified_base 17: mod_base = OTHER; note = 2'-O-methyl-adenosine
  modified_base 18: mod_base = cm
  modified_base 19: mod_base = um
  modified_base 20: mod_base = OTHER; note = 2'-O-methyl-adenosine
  modified_base 21: mod_base = OTHER; note = 2'-O-methyl-adenosine
tgaaagttttgctgctactaa

SEQ ID NO: 964 - RNA, 21 nt, synthetic construct
  source 1..21: mol_type = other RNA
  modified_base <1: mod_base = OTHER; note = two inverted abasic nucleosides
  modified_base 1: mod_base = um
  modified_base 1^2: mod_base = OTHER; note = Phosphorothioate bond
  modified_base 2: mod_base = OTHER; note = 2'-O-methyl-adenosine
  modified_base 2^3: mod_base = OTHER; note = Phosphorothioate bond
  modified_base 3: mod_base = um
  modified_base 4: mod_base = um
  modified_base 5: mod_base = OTHER; note = 2'-O-methyl-adenosine
  modified_base 6: mod_base = OTHER; note = 2'-O-methyl-adenosine
  modified_base 7: mod_base = OTHER; note = 2'-O-methyl-adenosine
  modified_base 8: mod_base = OTHER; note = 2'-O-methyl-adenosine
  modified_base 9: mod_base = OTHER; note = 2'-Fluoro-cytidine
  modified_base 10: mod_base = OTHER; note = 2'-Fluoro-uridine
  modified_base 11: mod_base = OTHER; note = 2'-Fluoro-guanosine
  modified_base 12: mod_base = OTHER; note = 2'-O-methyl-adenosine
  modified_base 13: mod_base = gm
  modified_base 14: mod_base = cm
  modified_base 15: mod_base = um
  modified_base 16: mod_base = gm
  modified_base 17: mod_base = gm
  modified_base 18: mod_base = OTHER; note = 2'-O-methyl-adenosine
  modified_base 19: mod_base = OTHER; note = 2'-O-methyl-adenosine
  modified_base 20: mod_base = um
  modified_base 21: mod_base = cm
tattaaaactgagctggaatc

SEQ ID NO: 965 - RNA, 21 nt, synthetic construct
  source 1..21: mol_type = other RNA
  modified_base <1: mod_base = OTHER; note = two inverted abasic nucleosides
  modified_base 1: mod_base = um
  modified_base 1^2: mod_base = OTHER; note = Phosphorothioate bond
  modified_base 2: mod_base = um
  modified_base 2^3: mod_base = OTHER; note = Phosphorothioate bond
  modified_base 3: mod_base = cm
  modified_base 4: mod_base = cm
  modified_base 5: mod_base = um
  modified_base 6: mod_base = um
  modified_base 7: mod_base = um
  modified_base 8: mod_base = OTHER; note = 2'-O-methyl-adenosine
  modified_base 9: mod_base = OTHER; note = 2'-Fluoro-uridine
  modified_base 10: mod_base = OTHER; note = 2'-Fluoro-guanosine
  modified_base 11: mod_base = OTHER; note = 2'-Fluoro-guanosine
  modified_base 12: mod_base = OTHER; note = 2'-O-methyl-adenosine
  modified_base 13: mod_base = um
  modified_base 14: mod_base = gm
  modified_base 15: mod_base = OTHER; note = 2'-O-methyl-adenosine
  modified_base 16: mod_base = um
  modified_base 17: mod_base = OTHER; note = 2'-O-methyl-adenosine
  modified_base 18: mod_base = OTHER; note = 2'-O-methyl-adenosine
  modified_base 19: mod_base = OTHER; note = 2'-O-methyl-adenosine
  modified_base 20: mod_base = gm
  modified_base 21: mod_base = OTHER; note = 2'-O-methyl-adenosine
ttcctttatggatgataaaga

SEQ ID NO: 966 - RNA, 21 nt, synthetic construct
  source 1..21: mol_type = other RNA
  modified_base <1: mod_base = OTHER; note = two inverted abasic nucleosides
  modified_base 1: mod_base = um
  modified_base 1^2: mod_base = OTHER; note = Phosphorothioate bond
  modified_base 2: mod_base = um
  modified_base 2^3: mod_base = OTHER; note = Phosphorothioate bond
  modified_base 3: mod_base = cm
  modified_base 4: mod_base = cm
  modified_base 5: mod_base = cm
  modified_base 6: mod_base = OTHER; note = 2'-O-methyl-adenosine
  modified_base 7: mod_base = gm
  modified_base 8: mod_base = um
  modified_base 9: mod_base = OTHER; note = 2'-Fluoro-guanosine
  modified_base 10: mod_base = OTHER; note = 2'-Fluoro-guanosine
  modified_base 11: mod_base = OTHER; note = 2'-Fluoro-guanosine
  modified_base 12: mod_base = um
  modified_base 13: mod_base = OTHER; note = 2'-O-methyl-adenosine
  modified_base 14: mod_base = um
  modified_base 15: mod_base = um
  modified_base 16: mod_base = OTHER; note = 2'-O-methyl-adenosine
  modified_base 17: mod_base = OTHER; note = 2'-O-methyl-adenosine
  modified_base 18: mod_base = OTHER; note = 2'-O-methyl-adenosine
  modified_base 19: mod_base = cm
  modified_base 20: mod_base = OTHER; note = 2'-O-methyl-adenosine
  modified_base 21: mod_base = OTHER; note = 2'-O-methyl-adenosine
ttcccagtgggtattaaacaa

SEQ ID NO: 967 - RNA, 21 nt, synthetic construct
  source 1..21: mol_type = other RNA
  modified_base <1: mod_base = OTHER; note = two inverted abasic nucleosides
  modified_base 1: mod_base = cm
  modified_base 1^2: mod_base = OTHER; note = Phosphorothioate bond
  modified_base 2: mod_base = cm
  modified_base 2^3: mod_base = OTHER; note = Phosphorothioate bond
  modified_base 3: mod_base = um
  modified_base 4: mod_base = cm
  modified_base 5: mod_base = um
  modified_base 6: mod_base = gm
  modified_base 7: mod_base = cm
  modified_base 8: mod_base = um
  modified_base 9: mod_base = OTHER; note = 2'-Fluoro-guanosine
  modified_base 10: mod_base = OTHER; note = 2'-Fluoro-guanosine
  modified_base 11: mod_base = OTHER; note = 2'-Fluoro-adenosine
  modified_base 12: mod_base = um
  modified_base 13: mod_base = cm
  modified_base 14: mod_base = cm
  modified_base 15: mod_base = OTHER; note = 2'-O-methyl-adenosine
  modified_base 16: mod_base = gm
  modified_base 17: mod_base = um
  modified_base 18: mod_base = OTHER; note = 2'-O-methyl-adenosine
  modified_base 19: mod_base = cm
  modified_base 20: mod_base = OTHER; note = 2'-O-methyl-adenosine
  modified_base 21: mod_base = um
cctctgctggatccagtacat

SEQ ID NO: 968 - RNA, 21 nt, synthetic construct
  source 1..21: mol_type = other RNA
  modified_base <1: mod_base = OTHER; note = two inverted abasic nucleosides
  modified_base 1: mod_base = gm
  modified_base 1^2: mod_base = OTHER; note = Phosphorothioate bond
  modified_base 2: mod_base = OTHER; note = 2'-O-methyl-adenosine
  modified_base 2^3: mod_base = OTHER; note = Phosphorothioate bond
  modified_base 3: mod_base = um
  modified_base 4: mod_base = um
  modified_base 5: mod_base = cm
  modified_base 6: mod_base = um
  modified_base 7: mod_base = gm
  modified_base 8: mod_base = um
  modified_base 9: mod_base = OTHER; note = 2'-Fluoro-adenosine
  modified_base 10: mod_base = OTHER; note = 2'-Fluoro-adenosine
  modified_base 11: mod_base = OTHER; note = 2'-Fluoro-guanosine
  modified_base 12: mod_base = OTHER; note = 2'-O-methyl-adenosine
  modified_base 13: mod_base = gm
  modified_base 14: mod_base = OTHER; note = 2'-O-methyl-adenosine
  modified_base 15: mod_base = um
  modified_base 16: mod_base = gm
  modified_base 17: mod_base = cm
  modified_base 18: mod_base = um
  modified_base 19: mod_base = gm
  modified_base 20: mod_base = OTHER; note = 2'-O-methyl-adenosine
  modified_base 21: mod_base = cm
gattctgtaagagatgctgac

SEQ ID NO: 969 - RNA, 21 nt, synthetic construct
  source 1..21: mol_type = other RNA
  modified_base <1: mod_base = OTHER; note = two inverted abasic nucleosides
  modified_base 1: mod_base = um
  modified_base 1^2: mod_base = OTHER; note = Phosphorothioate bond
  modified_base 2: mod_base = OTHER; note = 2'-O-methyl-adenosine
  modified_base 2^3: mod_base = OTHER; note = Phosphorothioate bond
  modified_base 3: mod_base = cm
  modified_base 4: mod_base = OTHER; note = 2'-O-methyl-adenosine
  modified_base 5: mod_base = um
  modified_base 6: mod_base = gm
  modified_base 7: mod_base = gm
  modified_base 8: mod_base = OTHER; note = 2'-O-methyl-adenosine
  modified_base 9: mod_base = OTHER; note = 2'-Fluoro-guanosine
  modified_base 10: mod_base = OTHER; note = 2'-Fluoro-adenosine
  modified_base 11: mod_base = OTHER; note = 2'-Fluoro-uridine
  modified_base 12: mod_base = um
  modified_base 13: mod_base = gm
  modified_base 14: mod_base = um
  modified_base 15: mod_base = cm
  modified_base 16: mod_base = OTHER; note = 2'-O-methyl-adenosine
  modified_base 17: mod_base = OTHER; note = 2'-O-methyl-adenosine
  modified_base 18: mod_base = cm
  modified_base 19: mod_base = gm
  modified_base 20: mod_base = um
  modified_base 21: mod_base = OTHER; note = 2'-O-methyl-adenosine
tacatggagattgtcaacgta

SEQ ID NO: 970 - RNA, 21 nt, synthetic construct
  source 1..21: mol_type = other RNA
  modified_base <1: mod_base = OTHER; note = two inverted abasic nucleosides
  modified_base 1: mod_base = gm
  modified_base 1^2: mod_base = OTHER; note = Phosphorothioate bond
  modified_base 2: mod_base = um
  modified_base 2^3: mod_base = OTHER; note = Phosphorothioate bond
  modified_base 3: mod_base = cm
  modified_base 4: mod_base = OTHER; note = 2'-O-methyl-adenosine
  modified_base 5: mod_base = cm
  modified_base 6: mod_base = um
  modified_base 7: mod_base = gm
  modified_base 8: mod_base = cm
  modified_base 9: mod_base = OTHER; note = 2'-Fluoro-adenosine
  modified_base 10: mod_base = OTHER; note = 2'-Fluoro-guanosine
  modified_base 11: mod_base = OTHER; note = 2'-Fluoro-uridine
  modified_base 12: mod_base = gm
  modified_base 13: mod_base = um
  modified_base 14: mod_base = OTHER; note = 2'-O-methyl-adenosine
  modified_base 15: mod_base = OTHER; note = 2'-O-methyl-adenosine
  modified_base 16: mod_base = OTHER; note = 2'-O-methyl-adenosine
  modified_base 17: mod_base = OTHER; note = 2'-O-methyl-adenosine
  modified_base 18: mod_base = um
  modified_base 19: mod_base = cm
  modified_base 20: mod_base = um
  modified_base 21: mod_base = cm
gtcactgcagtgtaaaatctc

SEQ ID NO: 971 - RNA, 21 nt, synthetic construct
  source 1..21: mol_type = other RNA
  modified_base <1: mod_base = OTHER; note = two inverted abasic nucleosides
  modified_base 1: mod_base = cm
  modified_base 1^2: mod_base = OTHER; note = Phosphorothioate bond
  modified_base 2: mod_base = OTHER; note = 2'-O-methyl-adenosine
  modified_base 2^3: mod_base = OTHER; note = Phosphorothioate bond
  modified_base 3: mod_base = gm
  modified_base 4: mod_base = cm
  modified_base 5: mod_base = um
  modified_base 6: mod_base = gm
  modified_base 7: mod_base = gm
  modified_base 8: mod_base = um
  modified_base 9: mod_base = OTHER; note = 2'-Fluoro-guanosine
  modified_base 10: mod_base = OTHER; note = 2'-Fluoro-adenosine
  modified_base 11: mod_base = OTHER; note = 2'-Fluoro-adenosine
  modified_base 12: mod_base = OTHER; note = 2'-O-methyl-adenosine
  modified_base 13: mod_base = um
  modified_base 14: mod_base = um
  modified_base 15: mod_base = um
  modified_base 16: mod_base = um
  modified_base 17: mod_base = OTHER; note = 2'-O-methyl-adenosine
  modified_base 18: mod_base = cm
  modified_base 19: mod_base = OTHER; note = 2'-O-methyl-adenosine
  modified_base 20: mod_base = OTHER; note = 2'-O-methyl-adenosine
  modified_base 21: mod_base = OTHER; note = 2'-O-methyl-adenosine
cagctggtgaaattttacaaa

SEQ ID NO: 972 - RNA, 21 nt, synthetic construct
  source 1..21: mol_type = other RNA
  modified_base <1: mod_base = OTHER; note = two inverted abasic nucleosides
  modified_base 1: mod_base = um
  modified_base 1^2: mod_base = OTHER; note = Phosphorothioate bond
  modified_base 2: mod_base = OTHER; note = 2'-O-methyl-adenosine
  modified_base 2^3: mod_base = OTHER; note = Phosphorothioate bond
  modified_base 3: mod_base = um
  modified_base 4: mod_base = gm
  modified_base 5: mod_base = gm
  modified_base 6: mod_base = OTHER; note = 2'-O-methyl-adenosine
  modified_base 7: mod_base = um
  modified_base 8: mod_base = gm
  modified_base 9: mod_base = OTHER; note = 2'-Fluoro-adenosine
  modified_base 10: mod_base = OTHER; note = 2'-Fluoro-uridine
  modified_base 11: mod_base = OTHER; note = 2'-Fluoro-adenosine
  modified_base 12: mod_base = OTHER; note = 2'-O-methyl-adenosine
  modified_base 13: mod_base = OTHER; note = 2'-O-methyl-adenosine
  modified_base 14: mod_base = gm
  modified_base 15: mod_base = OTHER; note = 2'-O-methyl-adenosine
  modified_base 16: mod_base = cm
  modified_base 17: mod_base = um
  modified_base 18: mod_base = OTHER; note = 2'-O-methyl-adenosine
  modified_base 19: mod_base = um
  modified_base 20: mod_base = um
  modified_base 21: mod_base = OTHER; note = 2'-O-methyl-adenosine
tatggatgataaagactatta

SEQ ID NO: 973 - RNA, 21 nt, synthetic construct
  source 1..21: mol_type = other RNA
  modified_base <1: mod_base = OTHER; note = two inverted abasic nucleosides
  modified_base 1: mod_base = OTHER; note = 2'-O-methyl-adenosine
  modified_base 1^2: mod_base = OTHER; note = Phosphorothioate bond
  modified_base 2: mod_base = gm
  modified_base 2^3: mod_base = OTHER; note = Phosphorothioate bond
  modified_base 3: mod_base = cm
  modified_base 4: mod_base = um
  modified_base 5: mod_base = OTHER; note = 2'-O-methyl-adenosine
  modified_base 6: mod_base = OTHER; note = 2'-O-methyl-adenosine
  modified_base 7: mod_base = gm
  modified_base 8: mod_base = OTHER; note = 2'-O-methyl-adenosine
  modified_base 9: mod_base = OTHER; note = 2'-Fluoro-uridine
  modified_base 10: mod_base = OTHER; note = 2'-Fluoro-uridine
  modified_base 11: mod_base = OTHER; note = 2'-Fluoro-uridine
  modified_base 12: mod_base = OTHER; note = 2'-O-methyl-adenosine
  modified_base 13: mod_base = um
  modified_base 14: mod_base = cm
  modified_base 15: mod_base = OTHER; note = 2'-O-methyl-adenosine
  modified_base 16: mod_base = gm
  modified_base 17: mod_base = OTHER; note = 2'-O-methyl-adenosine
  modified_base 18: mod_base = OTHER; note = 2'-O-methyl-adenosine
  modified_base 19: mod_base = um
  modified_base 20: mod_base = gm
  modified_base 21: mod_base = um
agctaagatttatcagaatgt

SEQ ID NO: 974 - RNA, 21 nt, synthetic construct
  source 1..21: mol_type = other RNA
  modified_base <1: mod_base = OTHER; note = two inverted abasic nucleosides
  modified_base 1: mod_base = gm
  modified_base 1^2: mod_base = OTHER; note = Phosphorothioate bond
  modified_base 2: mod_base = OTHER; note = 2'-O-methyl-adenosine
  modified_base 2^3: mod_base = OTHER; note = Phosphorothioate bond
  modified_base 3: mod_base = OTHER; note = 2'-O-methyl-adenosine
  modified_base 4: mod_base = um
  modified_base 5: mod_base = OTHER; note = 2'-O-methyl-adenosine
  modified_base 6: mod_base = cm
  modified_base 7: mod_base = OTHER; note = 2'-O-methyl-adenosine
  modified_base 8: mod_base = um
  modified_base 9: mod_base = OTHER; note = 2'-Fluoro-uridine
  modified_base 10: mod_base = OTHER; note = 2'-Fluoro-cytidine
  modified_base 11: mod_base = OTHER; note = 2'-Fluoro-cytidine
  modified_base 12: mod_base = OTHER; note = 2'-O-methyl-adenosine
  modified_base 13: mod_base = gm
  modified_base 14: mod_base = OTHER; note = 2'-O-methyl-adenosine
  modified_base 15: mod_base = OTHER; note = 2'-O-methyl-adenosine
  modified_base 16: mod_base = OTHER; note = 2'-O-methyl-adenosine
  modified_base 17: mod_base = OTHER; note = 2'-O-methyl-adenosine
  modified_base 18: mod_base = um
  modified_base 19: mod_base = gm
  modified_base 20: mod_base = um
  modified_base 21: mod_base = OTHER; note = 2'-O-methyl-adenosine
gaatacattccagaaaatgta

SEQ ID NO: 975 - RNA, 21 nt, synthetic construct
  source 1..21: mol_type = other RNA
  modified_base <1: mod_base = OTHER; note = two inverted abasic nucleosides
  modified_base 1: mod_base = OTHER; note = 2'-O-methyl-adenosine
  modified_base 1^2: mod_base = OTHER; note = Phosphorothioate bond
  modified_base 2: mod_base = um
  modified_base 2^3: mod_base = OTHER; note = Phosphorothioate bond
  modified_base 3: mod_base = OTHER; note = 2'-O-methyl-adenosine
  modified_base 4: mod_base = OTHER; note = 2'-O-methyl-adenosine
  modified_base 5: mod_base = gm
  modified_base 6: mod_base = OTHER; note = 2'-O-methyl-adenosine
  modified_base 7: mod_base = um
  modified_base 8: mod_base = um
  modified_base 9: mod_base = OTHER; note = 2'-Fluoro-cytidine
  modified_base 10: mod_base = OTHER; note = 2'-Fluoro-guanosine
  modified_base 11: mod_base = OTHER; note = 2'-Fluoro-adenosine
  modified_base 12: mod_base = cm
  modified_base 13: mod_base = gm
  modified_base 14: mod_base = OTHER; note = 2'-O-methyl-adenosine
  modified_base 15: mod_base = OTHER; note = 2'-O-methyl-adenosine
  modified_base 16: mod_base = OTHER; note = 2'-O-methyl-adenosine
  modified_base 17: mod_base = gm
  modified_base 18: mod_base = OTHER; note = 2'-O-methyl-adenosine
  modified_base 19: mod_base = OTHER; note = 2'-O-methyl-adenosine
  modified_base 20: mod_base = um
  modified_base 21: mod_base = um
ataagattcgacgaaagaatt

SEQ ID NO: 976 - RNA, 21 nt, synthetic construct
  source 1..21: mol_type = other RNA
  modified_base <1: mod_base = OTHER; note = two inverted abasic nucleosides
  modified_base 1: mod_base = OTHER; note = 2'-O-methyl-adenosine
  modified_base 1^2: mod_base = OTHER; note = Phosphorothioate bond
  modified_base 2: mod_base = OTHER; note = 2'-O-methyl-adenosine
  modified_base 2^3: mod_base = OTHER; note = Phosphorothioate bond
  modified_base 3: mod_base = gm
  modified_base 4: mod_base = um
  modified_base 5: mod_base = OTHER; note = 2'-O-methyl-adenosine
  modified_base 6: mod_base = gm
  modified_base 7: mod_base = cm
  modified_base 8: mod_base = OTHER; note = 2'-O-methyl-adenosine
  modified_base 9: mod_base = OTHER; note = 2'-Fluoro-uridine
  modified_base 10: mod_base = OTHER; note = 2'-Fluoro-guanosine
  modified_base 11: mod_base = OTHER; note = 2'-Fluoro-adenosine
  modified_base 12: mod_base = OTHER; note = 2'-O-methyl-adenosine
  modified_base 13: mod_base = OTHER; note = 2'-O-methyl-adenosine
  modified_base 14: mod_base = um
  modified_base 15: mod_base = cm
  modified_base 16: mod_base = cm
  modified_base 17: mod_base = um
  modified_base 18: mod_base = cm
  modified_base 19: mod_base = OTHER; note = 2'-O-methyl-adenosine
  modified_base 20: mod_base = OTHER; note = 2'-O-methyl-adenosine
  modified_base 21: mod_base = um
aagtagcatgaaatcctcaat

SEQ ID NO: 977 - RNA, 21 nt, synthetic construct
  source 1..21: mol_type = other RNA
  modified_base <1: mod_base = OTHER; note = two inverted abasic nucleosides
  modified_base 1: mod_base = cm
  modified_base 1^2: mod_base = OTHER; note = Phosphorothioate bond
  modified_base 2: mod_base = cm
  modified_base 2^3: mod_base = OTHER; note = Phosphorothioate bond
  modified_base 3: mod_base = um
  modified_base 4: mod_base = gm
  modified_base 5: mod_base = OTHER; note = 2'-O-methyl-adenosine
  modified_base 6: mod_base = gm
  modified_base 7: mod_base = um
  modified_base 8: mod_base = um
  modified_base 9: mod_base = OTHER; note = 2'-Fluoro-cytidine
  modified_base 10: mod_base = OTHER; note = 2'-Fluoro-cytidine
  modified_base 11: mod_base = OTHER; note = 2'-Fluoro-uridine
  modified_base 12: mod_base = um
  modified_base 13: mod_base = um
  modified_base 14: mod_base = cm
  modified_base 15: mod_base = cm
  modified_base 16: mod_base = um
  modified_base 17: mod_base = cm
  modified_base 18: mod_base = cm
  modified_base 19: mod_base = um
  modified_base 20: mod_base = gm
  modified_base 21: mod_base = um
cctgagttcctttcctcctgt

SEQ ID NO: 978 - RNA, 21 nt, synthetic construct
  source 1..21: mol_type = other RNA
  modified_base <1: mod_base = OTHER; note = two inverted abasic nucleosides
  modified_base 1: mod_base = cm
  modified_base 1^2: mod_base = OTHER; note = Phosphorothioate bond
  modified_base 2: mod_base = OTHER; note = 2'-O-methyl-adenosine
  modified_base 2^3: mod_base = OTHER; note = Phosphorothioate bond
  modified_base 3: mod_base = gm
  modified_base 4: mod_base = cm
  modified_base 5: mod_base = um
  modified_base 6: mod_base = gm
  modified_base 7: mod_base = cm
  modified_base 8: mod_base = OTHER; note = 2'-O-methyl-adenosine
  modified_base 9: mod_base = OTHER; note = 2'-Fluoro-adenosine
  modified_base 10: mod_base = OTHER; note = 2'-Fluoro-adenosine
  modified_base 11: mod_base = OTHER; note = 2'-Fluoro-guanosine
  modified_base 12: mod_base = um
  modified_base 13: mod_base = um
  modified_base 14: mod_base = um
  modified_base 15: mod_base = um
  modified_base 16: mod_base = cm
  modified_base 17: mod_base = um
  modified_base 18: mod_base = um
  modified_base 19: mod_base = cm
  modified_base 20: mod_base = OTHER; note = 2'-O-methyl-adenosine
  modified_base 21: mod_base = OTHER; note = 2'-O-methyl-adenosine
cagctgcaaagttttcttcaa

SEQ ID NO: 979 - RNA, 21 nt, synthetic construct
  source 1..21: mol_type = other RNA
  modified_base <1: mod_base = OTHER; note = two inverted abasic nucleosides
  modified_base 1: mod_base = um
  modified_base 1^2: mod_base = OTHER; note = Phosphorothioate bond
  modified_base 2: mod_base = OTHER; note = 2'-O-methyl-adenosine
  modified_base 2^3: mod_base = OTHER; note = Phosphorothioate bond
  modified_base 3: mod_base = gm
  modified_base 4: mod_base = cm
  modified_base 5: mod_base = OTHER; note = 2'-O-methyl-adenosine
  modified_base 6: mod_base = um
  modified_base 7: mod_base = gm
  modified_base 8: mod_base = OTHER; note = 2'-O-methyl-adenosine
  modified_base 9: mod_base = OTHER; note = 2'-Fluoro-adenosine
  modified_base 10: mod_base = OTHER; note = 2'-Fluoro-adenosine
  modified_base 11: mod_base = OTHER; note = 2'-Fluoro-uridine
  modified_base 12: mod_base = cm
  modified_base 13: mod_base = cm
  modified_base 14: mod_base = um
  modified_base 15: mod_base = cm
  modified_base 16: mod_base = OTHER; note = 2'-O-methyl-adenosine
  modified_base 17: mod_base = OTHER; note = 2'-O-methyl-adenosine
  modified_base 18: mod_base = um
  modified_base 19: mod_base = um
  modified_base 20: mod_base = um
  modified_base 21: mod_base = cm
tagcatgaaatcctcaatttc

SEQ ID NO: 980 - RNA, 21 nt, synthetic construct
  source 1..21: mol_type = other RNA
  modified_base <1: mod_base = OTHER; note = two inverted abasic nucleosides
  modified_base 1: mod_base = cm
  modified_base 1^2: mod_base = OTHER; note = Phosphorothioate bond
  modified_base 2: mod_base = um
  modified_base 2^3: mod_base = OTHER; note = Phosphorothioate bond
  modified_base 3: mod_base = OTHER; note = 2'-O-methyl-adenosine
  modified_base 4: mod_base = gm
  modified_base 5: mod_base = gm
  modified_base 6: mod_base = OTHER; note = 2'-O-methyl-adenosine
  modified_base 7: mod_base = gm
  modified_base 8: mod_base = gm
  modified_base 9: mod_base = OTHER; note = 2'-Fluoro-adenosine
  modified_base 10: mod_base = OTHER; note = 2'-Fluoro-adenosine
  modified_base 11: mod_base = OTHER; note = 2'-Fluoro-adenosine
  modified_base 12: mod_base = um
  modified_base 13: mod_base = OTHER; note = 2'-O-methyl-adenosine
  modified_base 14: mod_base = gm
  modified_base 15: mod_base = cm
  modified_base 16: mod_base = OTHER; note = 2'-O-methyl-adenosine
  modified_base 17: mod_base = OTHER; note = 2'-O-methyl-adenosine
  modified_base 18: mod_base = OTHER; note = 2'-O-methyl-adenosine
  modified_base 19: mod_base = OTHER; note = 2'-O-methyl-adenosine
  modified_base 20: mod_base = um
  modified_base 21: mod_base = OTHER; note = 2'-O-methyl-adenosine
ctaggaggaaatagcaaaata

SEQ ID NO: 981 - RNA, 21 nt, synthetic construct
  source 1..21: mol_type = other RNA
  modified_base <1: mod_base = OTHER; note = two inverted abasic nucleosides
  modified_base 1: mod_base = gm
  modified_base 1^2: mod_base = OTHER; note = Phosphorothioate bond
  modified_base 2: mod_base = OTHER; note = 2'-O-methyl-adenosine
  modified_base 2^3: mod_base = OTHER; note = Phosphorothioate bond
  modified_base 3: mod_base = um
  modified_base 4: mod_base = OTHER; note = 2'-O-methyl-adenosine
  modified_base 5: mod_base = um
  modified_base 6: mod_base = um
  modified_base 7: mod_base = OTHER; note = 2'-O-methyl-adenosine
  modified_base 8: mod_base = OTHER; note = 2'-O-methyl-adenosine
  modified_base 9: mod_base = OTHER; note = 2'-Fluoro-adenosine
  modified_base 10: mod_base = OTHER; note = 2'-Fluoro-adenosine
  modified_base 11: mod_base = OTHER; note = 2'-Fluoro-cytidine
  modified_base 12: mod_base = um
  modified_base 13: mod_base = gm
  modified_base 14: mod_base = OTHER; note = 2'-O-methyl-adenosine
  modified_base 15: mod_base = gm
  modified_base 16: mod_base = cm
  modified_base 17: mod_base = um
  modified_base 18: mod_base = gm
  modified_base 19: mod_base = gm
  modified_base 20: mod_base = OTHER; note = 2'-O-methyl-adenosine
  modified_base 21: mod_base = OTHER; note = 2'-O-methyl-adenosine
gatattaaaactgagctggaa

SEQ ID NO: 982 - RNA, 21 nt, synthetic construct
  source 1..21: mol_type = other RNA
  modified_base <1: mod_base = OTHER; note = two inverted abasic nucleosides
  modified_base 1: mod_base = um
  modified_base 1^2: mod_base = OTHER; note = Phosphorothioate bond
  modified_base 2: mod_base = OTHER; note = 2'-O-methyl-adenosine
  modified_base 2^3: mod_base = OTHER; note = Phosphorothioate bond
  modified_base 3: mod_base = OTHER; note = 2'-O-methyl-adenosine
  modified_base 4: mod_base = um
  modified_base 5: mod_base = OTHER; note = 2'-O-methyl-adenosine
  modified_base 6: mod_base = um
  modified_base 7: mod_base = um
  modified_base 8: mod_base = gm
  modified_base 9: mod_base = OTHER; note = 2'-Fluoro-uridine
  modified_base 10: mod_base = OTHER; note = 2'-Fluoro-cytidine
  modified_base 11: mod_base = OTHER; note = 2'-Fluoro-cytidine
  modified_base 12: mod_base = OTHER; note = 2'-O-methyl-adenosine
  modified_base 13: mod_base = gm
  modified_base 14: mod_base = um
  modified_base 15: mod_base = OTHER; note = 2'-O-methyl-adenosine
  modified_base 16: mod_base = cm
  modified_base 17: mod_base = OTHER; note = 2'-O-methyl-adenosine
  modified_base 18: mod_base = um
  modified_base 19: mod_base = OTHER; note = 2'-O-methyl-adenosine
  modified_base 20: mod_base = OTHER; note = 2'-O-methyl-adenosine
  modified_base 21: mod_base = OTHER; note = 2'-O-methyl-adenosine
taatattgtccagtacataaa

SEQ ID NO: 983 - RNA, 21 nt, synthetic construct
  source 1..21: mol_type = other RNA
  modified_base <1: mod_base = OTHER; note = two inverted abasic nucleosides
  modified_base 1: mod_base = um
  modified_base 1^2: mod_base = OTHER; note = Phosphorothioate bond
  modified_base 2: mod_base = OTHER; note = 2'-O-methyl-adenosine
  modified_base 2^3: mod_base = OTHER; note = Phosphorothioate bond
  modified_base 3: mod_base = OTHER; note = 2'-O-methyl-adenosine
  modified_base 4: mod_base = gm
  modified_base 5: mod_base = OTHER; note = 2'-O-methyl-adenosine
  modified_base 6: mod_base = um
  modified_base 7: mod_base = um
  modified_base 8: mod_base = um
  modified_base 9: mod_base = OTHER; note = 2'-Fluoro-adenosine
  modified_base 10: mod_base = OTHER; note = 2'-Fluoro-uridine
  modified_base 11: mod_base = OTHER; note = 2'-Fluoro-cytidine
  modified_base 12: mod_base = OTHER; note = 2'-O-methyl-adenosine
  modified_base 13: mod_base = gm
  modified_base 14: mod_base = OTHER; note = 2'-O-methyl-adenosine
  modified_base 15: mod_base = OTHER; note = 2'-O-methyl-adenosine
  modified_base 16: mod_base = um
  modified_base 17: mod_base = gm
  modified_base 18: mod_base = um
  modified_base 19: mod_base = um
  modified_base 20: mod_base = gm
  modified_base 21: mod_base = OTHER; note = 2'-O-methyl-adenosine
taagatttatcagaatgttga

SEQ ID NO: 984 - RNA, 21 nt, synthetic construct
  source 1..21: mol_type = other RNA
  modified_base <1: mod_base = OTHER; note = two inverted abasic nucleosides
  modified_base 1: mod_base = gm
  modified_base 1^2: mod_base = OTHER; note = Phosphorothioate bond
  modified_base 2: mod_base = um
  modified_base 2^3: mod_base = OTHER; note = Phosphorothioate bond
  modified_base 3: mod_base = gm
  modified_base 4: mod_base = OTHER; note = 2'-O-methyl-adenosine
  modified_base 5: mod_base = OTHER; note = 2'-O-methyl-adenosine
  modified_base 6: mod_base = OTHER; note = 2'-O-methyl-adenosine
  modified_base 7: mod_base = um
  modified_base 8: mod_base = um
  modified_base 9: mod_base = OTHER; note = 2'-Fluoro-uridine
  modified_base 10: mod_base = OTHER; note = 2'-Fluoro-uridine
  modified_base 11: mod_base = OTHER; note = 2'-Fluoro-adenosine
  modified_base 12: mod_base = cm
  modified_base 13: mod_base = OTHER; note = 2'-O-methyl-adenosine
  modified_base 14: mod_base = OTHER; note = 2'-O-methyl-adenosine
  modified_base 15: mod_base = OTHER; note = 2'-O-methyl-adenosine
  modified_base 16: mod_base = gm
  modified_base 17: mod_base = gm
  modified_base 18: mod_base = OTHER; note = 2'-O-methyl-adenosine
  modified_base 19: mod_base = OTHER; note = 2'-O-methyl-adenosine
  modified_base 20: mod_base = OTHER; note = 2'-O-methyl-adenosine
  modified_base 21: mod_base = um
gtgaaattttacaaaggaaat

SEQ ID NO: 985 - RNA, 21 nt, synthetic construct
  source 1..21: mol_type = other RNA
  modified_base <1: mod_base = OTHER; note = two inverted abasic nucleosides
  modified_base 1: mod_base = um
  modified_base 1^2: mod_base = OTHER; note = Phosphorothioate bond
  modified_base 2: mod_base = um
  modified_base 2^3: mod_base = OTHER; note = Phosphorothioate bond
  modified_base 3: mod_base = OTHER; note = 2'-O-methyl-adenosine
  modified_base 4: mod_base = OTHER; note = 2'-O-methyl-adenosine
  modified_base 5: mod_base = gm
  modified_base 6: mod_base = um
  modified_base 7: mod_base = OTHER; note = 2'-O-methyl-adenosine
  modified_base 8: mod_base = gm
  modified_base 9: mod_base = OTHER; note = 2'-Fluoro-cytidine
  modified_base 10: mod_base = OTHER; note = 2'-Fluoro-adenosine
  modified_base 11: mod_base = OTHER; note = 2'-Fluoro-uridine
  modified_base 12: mod_base = gm
  modified_base 13: mod_base = OTHER; note = 2'-O-methyl-adenosine
  modified_base 14: mod_base = OTHER; note = 2'-O-methyl-adenosine
  modified_base 15: mod_base = OTHER; note = 2'-O-methyl-adenosine
  modified_base 16: mod_base = um
  modified_base 17: mod_base = cm
  modified_base 18: mod_base = cm
  modified_base 19: mod_base = um
  modified_base 20: mod_base = cm
  modified_base 21: mod_base = OTHER; note = 2'-O-methyl-adenosine
ttaagtagcatgaaatcctca

SEQ ID NO: 986 - RNA, 21 nt, synthetic construct
  source 1..21: mol_type = other RNA
  modified_base <1: mod_base = OTHER; note = two inverted abasic nucleosides
  modified_base 1: mod_base = gm
  modified_base 1^2: mod_base = OTHER; note = Phosphorothioate bond
  modified_base 2: mod_base = cm
  modified_base 2^3: mod_base = OTHER; note = Phosphorothioate bond
  modified_base 3: mod_base = OTHER; note = 2'-O-methyl-adenosine
  modified_base 4: mod_base = gm
  modified_base 5: mod_base = um
  modified_base 6: mod_base = gm
  modified_base 7: mod_base = um
  modified_base 8: mod_base = OTHER; note = 2'-O-methyl-adenosine
  modified_base 9: mod_base = OTHER; note = 2'-Fluoro-adenosine
  modified_base 10: mod_base = OTHER; note = 2'-Fluoro-adenosine
  modified_base 11: mod_base = OTHER; note = 2'-Fluoro-adenosine
  modified_base 12: mod_base = um
  modified_base 13: mod_base = cm
  modified_base 14: mod_base = um
  modified_base 15: mod_base = cm
  modified_base 16: mod_base = cm
  modified_base 17: mod_base = OTHER; note = 2'-O-methyl-adenosine
  modified_base 18: mod_base = gm
  modified_base 19: mod_base = um
  modified_base 20: mod_base = cm
  modified_base 21: mod_base = um
gcagtgtaaaatctccagtct

SEQ ID NO: 987 - RNA, 21 nt, synthetic construct
  source 1..21: mol_type = other RNA
  modified_base <1: mod_base = OTHER; note = two inverted abasic nucleosides
  modified_base 1: mod_base = OTHER; note = 2'-O-methyl-adenosine
  modified_base 1^2: mod_base = OTHER; note = Phosphorothioate bond
  modified_base 2: mod_base = um
  modified_base 2^3: mod_base = OTHER; note = Phosphorothioate bond
  modified_base 3: mod_base = gm
  modified_base 4: mod_base = OTHER; note = 2'-O-methyl-adenosine
  modified_base 5: mod_base = OTHER; note = 2'-O-methyl-adenosine
  modified_base 6: mod_base = OTHER; note = 2'-O-methyl-adenosine
  modified_base 7: mod_base = gm
  modified_base 8: mod_base = um
  modified_base 9: mod_base = OTHER; note = 2'-Fluoro-uridine
  modified_base 10: mod_base = OTHER; note = 2'-Fluoro-uridine
  modified_base 11: mod_base = OTHER; note = 2'-Fluoro-uridine
  modified_base 12: mod_base = gm
  modified_base 13: mod_base = cm
  modified_base 14: mod_base = um
  modified_base 15: mod_base = gm
  modified_base 16: mod_base = cm
  modified_base 17: mod_base = um
  modified_base 18: mod_base = OTHER; note = 2'-O-methyl-adenosine
  modified_base 19: mod_base = cm
  modified_base 20: mod_base = um
  modified_base 21: mod_base = OTHER; note = 2'-O-methyl-adenosine
atgaaagttttgctgctacta

SEQ ID NO: 988 - RNA, 21 nt, synthetic construct
  source 1..21: mol_type = other RNA
  modified_base <1: mod_base = OTHER; note = two inverted abasic nucleosides
  modified_base 1: mod_base = OTHER; note = 2'-O-methyl-adenosine
  modified_base 1^2: mod_base = OTHER; note = Phosphorothioate bond
  modified_base 2: mod_base = um
  modified_base 2^3: mod_base = OTHER; note = Phosphorothioate bond
  modified_base 3: mod_base = OTHER; note = 2'-O-methyl-adenosine
  modified_base 4: mod_base = um
  modified_base 5: mod_base = um
  modified_base 6: mod_base = OTHER; note = 2'-O-methyl-adenosine
  modified_base 7: mod_base = OTHER; note = 2'-O-methyl-adenosine
  modified_base 8: mod_base = OTHER; note = 2'-O-methyl-adenosine
  modified_base 9: mod_base = OTHER; note = 2'-Fluoro-adenosine
  modified_base 10: mod_base = OTHER; note = 2'-Fluoro-cytidine
  modified_base 11: mod_base = OTHER; note = 2'-Fluoro-uridine
  modified_base 12: mod_base = gm
  modified_base 13: mod_base = OTHER; note = 2'-O-methyl-adenosine
  modified_base 14: mod_base = gm
  modified_base 15: mod_base = cm
  modified_base 16: mod_base = um
  modified_base 17: mod_base = gm
  modified_base 18: mod_base = gm
  modified_base 19: mod_base = OTHER; note = 2'-O-methyl-adenosine
  modified_base 20: mod_base = OTHER; note = 2'-O-methyl-adenosine
  modified_base 21: mod_base = um
atattaaaactgagctggaat

SEQ ID NO: 989 - RNA, 21 nt, synthetic construct
  source 1..21: mol_type = other RNA
  modified_base <1: mod_base = OTHER; note = two inverted abasic nucleosides
  modified_base 1: mod_base = cm
  modified_base 1^2: mod_base = OTHER; note = Phosphorothioate bond
  modified_base 2: mod_base = gm
  modified_base 2^3: mod_base = OTHER; note = Phosphorothioate bond
  modified_base 3: mod_base = um
  modified_base 4: mod_base = um
  modified_base 5: mod_base = OTHER; note = 2'-O-methyl-adenosine
  modified_base 6: mod_base = OTHER; note = 2'-O-methyl-adenosine
  modified_base 7: mod_base = gm
  modified_base 8: mod_base = um
  modified_base 9: mod_base = OTHER; note = 2'-Fluoro-adenosine
  modified_base 10: mod_base = OTHER; note = 2'-Fluoro-guanosine
  modified_base 11: mod_base = OTHER; note = 2'-Fluoro-cytidine
  modified_base 12: mod_base = OTHER; note = 2'-O-methyl-adenosine
  modified_base 13: mod_base = um
  modified_base 14: mod_base = gm
  modified_base 15: mod_base = OTHER; note = 2'-O-methyl-adenosine
  modified_base 16: mod_base = OTHER; note = 2'-O-methyl-adenosine
  modified_base 17: mod_base = OTHER; note = 2'-O-methyl-adenosine
  modified_base 18: mod_base = um
  modified_base 19: mod_base = cm
  modified_base 20: mod_base = cm
  modified_base 21: mod_base = um
cgttaagtagcatgaaatcct

SEQ ID NO: 990 - RNA, 21 nt, synthetic construct
  source 1..21: mol_type = other RNA
  modified_base <1: mod_base = OTHER; note = two inverted abasic nucleosides
  modified_base 1: mod_base = gm
  modified_base 1^2: mod_base = OTHER; note = Phosphorothioate bond
  modified_base 2: mod_base = cm
  modified_base 2^3: mod_base = OTHER; note = Phosphorothioate bond
  modified_base 3: mod_base = OTHER; note = 2'-O-methyl-adenosine
  modified_base 4: mod_base = gm
  modified_base 5: mod_base = OTHER; note = 2'-O-methyl-adenosine
  modified_base 6: mod_base = cm
  modified_base 7: mod_base = um
  modified_base 8: mod_base = um
  modified_base 9: mod_base = OTHER; note = 2'-Fluoro-cytidine
  modified_base 10: mod_base = OTHER; note = 2'-Fluoro-adenosine
  modified_base 11: mod_base = OTHER; note = 2'-Fluoro-guanosine
  modified_base 12: mod_base = OTHER; note = 2'-O-methyl-adenosine
  modified_base 13: mod_base = OTHER; note = 2'-O-methyl-adenosine
  modified_base 14: mod_base = OTHER; note = 2'-O-methyl-adenosine
  modified_base 15: mod_base = um
  modified_base 16: mod_base = gm
  modified_base 17: mod_base = um
  modified_base 18: mod_base = cm
  modified_base 19: mod_base = um
  modified_base 20: mod_base = um
  modified_base 21: mod_base = cm
gcagacttcagaaatgtcttc

SEQ ID NO: 991 - RNA, 21 nt, synthetic construct
  source 1..21: mol_type = other RNA
  modified_base <1: mod_base = OTHER; note = two inverted abasic nucleosides
  modified_base 1: mod_base = cm
  modified_base 1^2: mod_base = OTHER; note = Phosphorothioate bond
  modified_base 2: mod_base = um
  modified_base 2^3: mod_base = OTHER; note = Phosphorothioate bond
  modified_base 3: mod_base = um
  modified_base 4: mod_base = OTHER; note = 2'-O-methyl-adenosine
  modified_base 5: mod_base = OTHER; note = 2'-O-methyl-adenosine
  modified_base 6: mod_base = um
  modified_base 7: mod_base = OTHER; note = 2'-O-methyl-adenosine
  modified_base 8: mod_base = um
  modified_base 9: mod_base = OTHER; note = 2'-Fluoro-uridine
  modified_base 10: mod_base = OTHER; note = 2'-Fluoro-guanosine
  modified_base 11: mod_base = OTHER; note = 2'-Fluoro-uridine
  modified_base 12: mod_base = cm
  modified_base 13: mod_base = cm
  modified_base 14: mod_base = OTHER; note = 2'-O-methyl-adenosine
  modified_base 15: mod_base = gm
  modified_base 16: mod_base = um
  modified_base 17: mod_base = OTHER; note = 2'-O-methyl-adenosine
  modified_base 18: mod_base = cm
  modified_base 19: mod_base = OTHER; note = 2'-O-methyl-adenosine
  modified_base 20: mod_base = um
  modified_base 21: mod_base = OTHER; note = 2'-O-methyl-adenosine
cttaatattgtccagtacata

SEQ ID NO: 992 - RNA, 21 nt, synthetic construct
  source 1..21: mol_type = other RNA
  modified_base <1: mod_base = OTHER; note = two inverted abasic nucleosides
  modified_base 1: mod_base = cm
  modified_base 1^2: mod_base = OTHER; note = Phosphorothioate bond
  modified_base 2: mod_base = cm
  modified_base 2^3: mod_base = OTHER; note = Phosphorothioate bond
  modified_base 3: mod_base = OTHER; note = 2'-O-methyl-adenosine
  modified_base 4: mod_base = gm
  modified_base 5: mod_base = cm
  modified_base 6: mod_base = um
  modified_base 7: mod_base = OTHER; note = 2'-O-methyl-adenosine
  modified_base 8: mod_base = OTHER; note = 2'-O-methyl-adenosine
  modified_base 9: mod_base = OTHER; note = 2'-Fluoro-guanosine
  modified_base 10: mod_base = OTHER; note = 2'-Fluoro-adenosine
  modified_base 11: mod_base = OTHER; note = 2'-Fluoro-uridine
  modified_base 12: mod_base = um
  modified_base 13: mod_base = um
  modified_base 14: mod_base = OTHER; note = 2'-O-methyl-adenosine
  modified_base 15: mod_base = um
  modified_base 16: mod_base = cm
  modified_base 17: mod_base = OTHER; note = 2'-O-methyl-adenosine
  modified_base 18: mod_base = gm
  modified_base 19: mod_base = OTHER; note = 2'-O-methyl-adenosine
  modified_base 20: mod_base = OTHER; note = 2'-O-methyl-adenosine
  modified_base 21: mod_base = um
ccagctaagatttatcagaat

SEQ ID NO: 993 - RNA, 21 nt, synthetic construct
  source 1..21: mol_type = other RNA
  modified_base <1: mod_base = OTHER; note = two inverted abasic nucleosides
  modified_base 1: mod_base = OTHER; note = 2'-O-methyl-adenosine
  modified_base 1^2: mod_base = OTHER; note = Phosphorothioate bond
  modified_base 2: mod_base = gm
  modified_base 2^3: mod_base = OTHER; note = Phosphorothioate bond
  modified_base 3: mod_base = cm
  modified_base 4: mod_base = um
  modified_base 5: mod_base = cm
  modified_base 6: mod_base = um
  modified_base 7: mod_base = OTHER; note = 2'-O-methyl-adenosine
  modified_base 8: mod_base = cm
  modified_base 9: mod_base = OTHER; note = 2'-Fluoro-uridine
  modified_base 10: mod_base = OTHER; note = 2'-Fluoro-uridine
  modified_base 11: mod_base = OTHER; note = 2'-Fluoro-uridine
  modified_base 12: mod_base = OTHER; note = 2'-O-methyl-adenosine
  modified_base 13: mod_base = cm
  modified_base 14: mod_base = gm
  modified_base 15: mod_base = OTHER; note = 2'-O-methyl-adenosine
  modified_base 16: mod_base = OTHER; note = 2'-O-methyl-adenosine
  modified_base 17: mod_base = gm
  modified_base 18: mod_base = um
  modified_base 19: mod_base = gm
  modified_base 20: mod_base = um
  modified_base 21: mod_base = um
agctctactttacgaagtgtt

SEQ ID NO: 994 - RNA, 21 nt, synthetic construct
  source 1..21: mol_type = other RNA
  modified_base <1: mod_base = OTHER; note = two inverted abasic nucleosides
  modified_base 1: mod_base = gm
  modified_base 1^2: mod_base = OTHER; note = Phosphorothioate bond
  modified_base 2: mod_base = cm
  modified_base 2^3: mod_base = OTHER; note = Phosphorothioate bond
  modified_base 3: mod_base = um
  modified_base 4: mod_base = OTHER; note = 2'-O-methyl-adenosine
  modified_base 5: mod_base = OTHER; note = 2'-O-methyl-adenosine
  modified_base 6: mod_base = gm
  modified_base 7: mod_base = OTHER; note = 2'-O-methyl-adenosine
  modified_base 8: mod_base = um
  modified_base 9: mod_base = OTHER; note = 2'-Fluoro-uridine
  modified_base 10: mod_base = OTHER; note = 2'-Fluoro-uridine
  modified_base 11: mod_base = OTHER; note = 2'-Fluoro-adenosine
  modified_base 12: mod_base = um
  modified_base 13: mod_base = cm
  modified_base 14: mod_base = OTHER; note = 2'-O-methyl-adenosine
  modified_base 15: mod_base = gm
  modified_base 16: mod_base = OTHER; note = 2'-O-methyl-adenosine
  modified_base 17: mod_base = OTHER; note = 2'-O-methyl-adenosine
  modified_base 18: mod_base = um
  modified_base 19: mod_base = gm
  modified_base 20: mod_base = um
  modified_base 21: mod_base = um
gctaagatttatcagaatgtt

SEQ ID NO: 995 - RNA, 21 nt, synthetic construct
  source 1..21: mol_type = other RNA
  modified_base <1: mod_base = OTHER; note = two inverted abasic nucleosides
  modified_base 1: mod_base = cm
  modified_base 1^2: mod_base = OTHER; note = Phosphorothioate bond
  modified_base 2: mod_base = OTHER; note = 2'-O-methyl-adenosine
  modified_base 2^3: mod_base = OTHER; note = Phosphorothioate bond
  modified_base 3: mod_base = gm
  modified_base 4: mod_base = um
  modified_base 5: mod_base = OTHER; note = 2'-O-methyl-adenosine
  modified_base 6: mod_base = cm
  modified_base 7: mod_base = cm
  modified_base 8: mod_base = OTHER; note = 2'-O-methyl-adenosine
  modified_base 9: mod_base = OTHER; note = 2'-Fluoro-adenosine
  modified_base 10: mod_base = OTHER; note = 2'-Fluoro-uridine
  modified_base 11: mod_base = OTHER; note = 2'-Fluoro-adenosine
  modified_base 12: mod_base = OTHER; note = 2'-O-methyl-adenosine
  modified_base 13: mod_base = OTHER; note = 2'-O-methyl-adenosine
  modified_base 14: mod_base = gm
  modified_base 15: mod_base = cm
  modified_base 16: mod_base = OTHER; note = 2'-O-methyl-adenosine
  modified_base 17: mod_base = OTHER; note = 2'-O-methyl-adenosine
  modified_base 18: mod_base = gm
  modified_base 19: mod_base = OTHER; note = 2'-O-methyl-adenosine
  modified_base 20: mod_base = OTHER; note = 2'-O-methyl-adenosine
  modified_base 21: mod_base = um
cagtaccaataaagcaagaat

SEQ ID NO: 996 - RNA, 21 nt, synthetic construct
  source 1..21: mol_type = other RNA
  modified_base <1: mod_base = OTHER; note = two inverted abasic nucleosides
  modified_base 1: mod_base = cm
  modified_base 1^2: mod_base = OTHER; note = Phosphorothioate bond
  modified_base 2: mod_base = cm
  modified_base 2^3: mod_base = OTHER; note = Phosphorothioate bond
  modified_base 3: mod_base = um
  modified_base 4: mod_base = cm
  modified_base 5: mod_base = um
  modified_base 6: mod_base = cm
  modified_base 7: mod_base = um
  modified_base 8: mod_base = cm
  modified_base 9: mod_base = OTHER; note = 2'-Fluoro-adenosine
  modified_base 10: mod_base = OTHER; note = 2'-Fluoro-adenosine
  modified_base 11: mod_base = OTHER; note = 2'-Fluoro-guanosine
  modified_base 12: mod_base = um
  modified_base 13: mod_base = cm
  modified_base 14: mod_base = cm
  modified_base 15: mod_base = gm
  modified_base 16: mod_base = um
  modified_base 17: mod_base = um
  modified_base 18: mod_base = OTHER; note = 2'-O-methyl-adenosine
  modified_base 19: mod_base = OTHER; note = 2'-O-methyl-adenosine
  modified_base 20: mod_base = gm
  modified_base 21: mod_base = um
cctctctcaagtccgttaagt

SEQ ID NO: 997 - RNA, 21 nt, synthetic construct
  source 1..21: mol_type = other RNA
  modified_base <1: mod_base = OTHER; note = two inverted abasic nucleosides
  modified_base 1: mod_base = um
  modified_base 1^2: mod_base = OTHER; note = Phosphorothioate bond
  modified_base 2: mod_base = OTHER; note = 2'-O-methyl-adenosine
  modified_base 2^3: mod_base = OTHER; note = Phosphorothioate bond
  modified_base 3: mod_base = um
  modified_base 4: mod_base = cm
  modified_base 5: mod_base = OTHER; note = 2'-O-methyl-adenosine
  modified_base 6: mod_base = OTHER; note = 2'-O-methyl-adenosine
  modified_base 7: mod_base = gm
  modified_base 8: mod_base = cm
  modified_base 9: mod_base = OTHER; note = 2'-Fluoro-uridine
  modified_base 10: mod_base = OTHER; note = 2'-Fluoro-cytidine
  modified_base 11: mod_base = OTHER; note = 2'-Fluoro-uridine
  modified_base 12: mod_base = OTHER; note = 2'-O-methyl-adenosine
  modified_base 13: mod_base = cm
  modified_base 14: mod_base = um
  modified_base 15: mod_base = um
  modified_base 16: mod_base = um
  modified_base 17: mod_base = OTHER; note = 2'-O-methyl-adenosine
  modified_base 18: mod_base = cm
  modified_base 19: mod_base = gm
  modified_base 20: mod_base = OTHER; note = 2'-O-methyl-adenosine
  modified_base 21: mod_base = OTHER; note = 2'-O-methyl-adenosine
tatcaagctctactttacgaa

SEQ ID NO: 998 - RNA, 21 nt, synthetic construct
  source 1..21: mol_type = other RNA
  modified_base <1: mod_base = OTHER; note = two inverted abasic nucleosides
  modified_base 1: mod_base = OTHER; note = 2'-O-methyl-adenosine
  modified_base 1^2: mod_base = OTHER; note = Phosphorothioate bond
  modified_base 2: mod_base = um
  modified_base 2^3: mod_base = OTHER; note = Phosphorothioate bond
  modified_base 3: mod_base = gm
  modified_base 4: mod_base = um
  modified_base 5: mod_base = um
  modified_base 6: mod_base = gm
  modified_base 7: mod_base = OTHER; note = 2'-O-methyl-adenosine
  modified_base 8: mod_base = OTHER; note = 2'-O-methyl-adenosine
  modified_base 9: mod_base = OTHER; note = 2'-Fluoro-cytidine
  modified_base 10: mod_base = OTHER; note = 2'-Fluoro-adenosine
  modified_base 11: mod_base = OTHER; note = 2'-Fluoro-guanosine
  modified_base 12: mod_base = cm
  modified_base 13: mod_base = um
  modified_base 14: mod_base = gm
  modified_base 15: mod_base = gm
  modified_base 16: mod_base = um
  modified_base 17: mod_base = gm
  modified_base 18: mod_base = OTHER; note = 2'-O-methyl-adenosine
  modified_base 19: mod_base = OTHER; note = 2'-O-methyl-adenosine
  modified_base 20: mod_base = OTHER; note = 2'-O-methyl-adenosine
  modified_base 21: mod_base = um
atgttgaacagctggtgaaat

SEQ ID NO: 999 - RNA, 21 nt, synthetic construct
  source 1..21: mol_type = other RNA
  modified_base <1: mod_base = OTHER; note = two inverted abasic nucleosides
  modified_base 1: mod_base = OTHER; note = 2'-O-methyl-adenosine
  modified_base 1^2: mod_base = OTHER; note = Phosphorothioate bond
  modified_base 2: mod_base = OTHER; note = 2'-O-methyl-adenosine
  modified_base 2^3: mod_base = OTHER; note = Phosphorothioate bond
  modified_base 3: mod_base = gm
  modified_base 4: mod_base = OTHER; note = 2'-O-methyl-adenosine
  modified_base 5: mod_base = um
  modified_base 6: mod_base = um
  modified_base 7: mod_base = um
  modified_base 8: mod_base = OTHER; note = 2'-O-methyl-adenosine
  modified_base 9: mod_base = OTHER; note = 2'-Fluoro-uridine
  modified_base 10: mod_base = OTHER; note = 2'-Fluoro-cytidine
  modified_base 11: mod_base = OTHER; note = 2'-Fluoro-adenosine
  modified_base 12: mod_base = gm
  modified_base 13: mod_base = OTHER; note = 2'-O-methyl-adenosine
  modified_base 14: mod_base = OTHER; note = 2'-O-methyl-adenosine
  modified_base 15: mod_base = um
  modified_base 16: mod_base = gm
  modified_base 17: mod_base = um
  modified_base 18: mod_base = um
  modified_base 19: mod_base = gm
  modified_base 20: mod_base = OTHER; note = 2'-O-methyl-adenosine
  modified_base 21: mod_base = OTHER; note = 2'-O-methyl-adenosine
aagatttatcagaatgttgaa

SEQ ID NO: 1000 - RNA, 21 nt, synthetic construct
  source 1..21: mol_type = other RNA
  modified_base <1: mod_base = OTHER; note = two inverted abasic nucleosides
  modified_base 1: mod_base = um
  modified_base 1^2: mod_base = OTHER; note = Phosphorothioate bond
  modified_base 2: mod_base = cm
  modified_base 2^3: mod_base = OTHER; note = Phosphorothioate bond
  modified_base 3: mod_base = cm
  modified_base 4: mod_base = OTHER; note = 2'-O-methyl-adenosine
  modified_base 5: mod_base = um
  modified_base 6: mod_base = gm
  modified_base 7: mod_base = gm
  modified_base 8: mod_base = gm
  modified_base 9: mod_base = OTHER; note = 2'-Fluoro-uridine
  modified_base 10: mod_base = OTHER; note = 2'-Fluoro-uridine
  modified_base 11: mod_base = OTHER; note = 2'-Fluoro-uridine
  modified_base 12: mod_base = OTHER; note = 2'-O-methyl-adenosine
  modified_base 13: mod_base = um
  modified_base 14: mod_base = OTHER; note = 2'-O-methyl-adenosine
  modified_base 15: mod_base = um
  modified_base 16: mod_base = OTHER; note = 2'-O-methyl-adenosine
  modified_base 17: mod_base = um
  modified_base 18: mod_base = gm
  modified_base 19: mod_base = gm
  modified_base 20: mod_base = OTHER; note = 2'-O-methyl-adenosine
  modified_base 21: mod_base = um
tccatgggtttatatatggat

SEQ ID NO: 1001 - RNA, 21 nt, synthetic construct
  source 1..21: mol_type = other RNA
  modified_base <1: mod_base = OTHER; note = two inverted abasic nucleosides
  modified_base 1: mod_base = gm
  modified_base 1^2: mod_base = OTHER; note = Phosphorothioate bond
  modified_base 2: mod_base = OTHER; note = 2'-O-methyl-adenosine
  modified_base 2^3: mod_base = OTHER; note = Phosphorothioate bond
  modified_base 3: mod_base = OTHER; note = 2'-O-methyl-adenosine
  modified_base 4: mod_base = gm
  modified_base 5: mod_base = OTHER; note = 2'-O-methyl-adenosine
  modified_base 6: mod_base = OTHER; note = 2'-O-methyl-adenosine
  modified_base 7: mod_base = OTHER; note = 2'-O-methyl-adenosine
  modified_base 8: mod_base = um
  modified_base 9: mod_base = OTHER; note = 2'-Fluoro-guanosine
  modified_base 10: mod_base = OTHER; note = 2'-Fluoro-adenosine
  modified_base 11: mod_base = OTHER; note = 2'-Fluoro-guanosine
  modified_base 12: mod_base = gm
  modified_base 13: mod_base = OTHER; note = 2'-O-methyl-adenosine
  modified_base 14: mod_base = cm
  modified_base 15: mod_base = OTHER; note = 2'-O-methyl-adenosine
  modified_base 16: mod_base = OTHER; note = 2'-O-methyl-adenosine
  modified_base 17: mod_base = OTHER; note = 2'-O-methyl-adenosine
  modified_base 18: mod_base = um
  modified_base 19: mod_base = um
  modified_base 20: mod_base = OTHER; note = 2'-O-methyl-adenosine
  modified_base 21: mod_base = cm
gaagaaatgaggacaaattac

SEQ ID NO: 1002 - RNA, 21 nt, synthetic construct
  source 1..21: mol_type = other RNA
  modified_base <1: mod_base = OTHER; note = two inverted abasic nucleosides
  modified_base 1: mod_base = um
  modified_base 1^2: mod_base = OTHER; note = Phosphorothioate bond
  modified_base 2: mod_base = gm
  modified_base 2^3: mod_base = OTHER; note = Phosphorothioate bond
  modified_base 3: mod_base = OTHER; note = 2'-O-methyl-adenosine
  modified_base 4: mod_base = um
  modified_base 5: mod_base = OTHER; note = 2'-O-methyl-adenosine
  modified_base 6: mod_base = OTHER; note = 2'-O-methyl-adenosine
  modified_base 7: mod_base = gm
  modified_base 8: mod_base = OTHER; note = 2'-O-methyl-adenosine
  modified_base 9: mod_base = OTHER; note = 2'-Fluoro-uridine
  modified_base 10: mod_base = OTHER; note = 2'-Fluoro-uridine
  modified_base 11: mod_base = OTHER; note = 2'-Fluoro-cytidine
  modified_base 12: mod_base = gm
  modified_base 13: mod_base = OTHER; note = 2'-O-methyl-adenosine
  modified_base 14: mod_base = cm
  modified_base 15: mod_base = gm
  modified_base 16: mod_base = OTHER; note = 2'-O-methyl-adenosine
  modified_base 17: mod_base = OTHER; note = 2'-O-methyl-adenosine
  modified_base 18: mod_base = OTHER; note = 2'-O-methyl-adenosine
  modified_base 19: mod_base = gm
  modified_base 20: mod_base = OTHER; note = 2'-O-methyl-adenosine
  modified_base 21: mod_base = OTHER; note = 2'-O-methyl-adenosine
tgataagattcgacgaaagaa

SEQ ID NO: 1003 - RNA, 21 nt, synthetic construct
  source 1..21: mol_type = other RNA
  modified_base <1: mod_base = OTHER; note = two inverted abasic nucleosides
  modified_base 1: mod_base = um
  modified_base 1^2: mod_base = OTHER; note = Phosphorothioate bond
  modified_base 2: mod_base = gm
  modified_base 2^3: mod_base = OTHER; note = Phosphorothioate bond
  modified_base 3: mod_base = OTHER; note = 2'-O-methyl-adenosine
  modified_base 4: mod_base = um
  modified_base 5: mod_base = OTHER; note = 2'-O-methyl-adenosine
  modified_base 6: mod_base = OTHER; note = 2'-O-methyl-adenosine
  modified_base 7: mod_base = OTHER; note = 2'-O-methyl-adenosine
  modified_base 8: mod_base = gm
  modified_base 9: mod_base = OTHER; note = 2'-Fluoro-adenosine
  modified_base 10: mod_base = OTHER; note = 2'-Fluoro-cytidine
  modified_base 11: mod_base = OTHER; note = 2'-Fluoro-uridine
  modified_base 12: mod_base = OTHER; note = 2'-O-methyl-adenosine
  modified_base 13: mod_base = um
  modified_base 14: mod_base = um
  modified_base 15: mod_base = OTHER; note = 2'-O-methyl-adenosine
  modified_base 16: mod_base = um
  modified_base 17: mod_base = um
  modified_base 18: mod_base = cm
  modified_base 19: mod_base = cm
  modified_base 20: mod_base = cm
  modified_base 21: mod_base = um
tgataaagactattattccct

SEQ ID NO: 1004 - RNA, 21 nt, synthetic construct
  source 1..21: mol_type = other RNA
  modified_base <1: mod_base = OTHER; note = two inverted abasic nucleosides
  modified_base 1: mod_base = OTHER; note = 2'-O-methyl-adenosine
  modified_base 1^2: mod_base = OTHER; note = Phosphorothioate bond
  modified_base 2: mod_base = gm
  modified_base 2^3: mod_base = OTHER; note = Phosphorothioate bond
  modified_base 3: mod_base = cm
  modified_base 4: mod_base = um
  modified_base 5: mod_base = gm
  modified_base 6: mod_base = OTHER; note = 2'-O-methyl-adenosine
  modified_base 7: mod_base = gm
  modified_base 8: mod_base = um
  modified_base 9: mod_base = OTHER; note = 2'-Fluoro-cytidine
  modified_base 10: mod_base = OTHER; note = 2'-Fluoro-cytidine
  modified_base 11: mod_base = OTHER; note = 2'-Fluoro-adenosine
  modified_base 12: mod_base = um
  modified_base 13: mod_base = gm
  modified_base 14: mod_base = gm
  modified_base 15: mod_base = gm
  modified_base 16: mod_base = um
  modified_base 17: mod_base = um
  modified_base 18: mod_base = um
  modified_base 19: mod_base = OTHER; note = 2'-O-methyl-adenosine
  modified_base 20: mod_base = um
  modified_base 21: mod_base = OTHER; note = 2'-O-methyl-adenosine
agctgagtccatgggtttata

SEQ ID NO: 1005 - RNA, 21 nt, synthetic construct
  source 1..21: mol_type = other RNA
  modified_base <1: mod_base = OTHER; note = two inverted abasic nucleosides
  modified_base 1: mod_base = um
  modified_base 1^2: mod_base = OTHER; note = Phosphorothioate bond
  modified_base 2: mod_base = cm
  modified_base 2^3: mod_base = OTHER; note = Phosphorothioate bond
  modified_base 3: mod_base = cm
  modified_base 4: mod_base = um
  modified_base 5: mod_base = OTHER; note = 2'-O-methyl-adenosine
  modified_base 6: mod_base = OTHER; note = 2'-O-methyl-adenosine
  modified_base 7: mod_base = gm
  modified_base 8: mod_base = OTHER; note = 2'-O-methyl-adenosine
  modified_base 9: mod_base = OTHER; note = 2'-Fluoro-cytidine
  modified_base 10: mod_base = OTHER; note = 2'-Fluoro-uridine
  modified_base 11: mod_base = OTHER; note = 2'-Fluoro-guanosine
  modified_base 12: mod_base = OTHER; note = 2'-O-methyl-adenosine
  modified_base 13: mod_base = gm
  modified_base 14: mod_base = gm
  modified_base 15: mod_base = OTHER; note = 2'-O-methyl-adenosine
  modified_base 16: mod_base = OTHER; note = 2'-O-methyl-adenosine
  modified_base 17: mod_base = gm
  modified_base 18: mod_base = um
  modified_base 19: mod_base = OTHER; note = 2'-O-methyl-adenosine
  modified_base 20: mod_base = gm
  modified_base 21: mod_base = OTHER; note = 2'-O-methyl-adenosine
tcctaagactgaggaagtaga

SEQ ID NO: 1006 - RNA, 21 nt, synthetic construct
  source 1..21: mol_type = other RNA
  modified_base <1: mod_base = OTHER; note = two inverted abasic nucleosides
  modified_base 1: mod_base = um
  modified_base 1^2: mod_base = OTHER; note = Phosphorothioate bond
  modified_base 2: mod_base = um
  modified_base 2^3: mod_base = OTHER; note = Phosphorothioate bond
  modified_base 3: mod_base = cm
  modified_base 4: mod_base = cm
  modified_base 5: mod_base = OTHER; note = 2'-O-methyl-adenosine
  modified_base 6: mod_base = OTHER; note = 2'-O-methyl-adenosine
  modified_base 7: mod_base = cm
  modified_base 8: mod_base = OTHER; note = 2'-O-methyl-adenosine
  modified_base 9: mod_base = OTHER; note = 2'-Fluoro-cytidine
  modified_base 10: mod_base = OTHER; note = 2'-Fluoro-cytidine
  modified_base 11: mod_base = OTHER; note = 2'-Fluoro-uridine
  modified_base 12: mod_base = gm
  modified_base 13: mod_base = OTHER; note = 2'-O-methyl-adenosine
  modified_base 14: mod_base = gm
  modified_base 15: mod_base = um
  modified_base 16: mod_base = um
  modified_base 17: mod_base = cm
  modified_base 18: mod_base = cm
  modified_base 19: mod_base = um
  modified_base 20: mod_base = um
  modified_base 21: mod_base = um
ttccaacacctgagttccttt

SEQ ID NO: 1007 - RNA, 21 nt, synthetic construct
  source 1..21: mol_type = other RNA
  modified_base <1: mod_base = OTHER; note = two inverted abasic nucleosides
  modified_base 1: mod_base = cm
  modified_base 1^2: mod_base = OTHER; note = Phosphorothioate bond
  modified_base 2: mod_base = OTHER; note = 2'-O-methyl-adenosine
  modified_base 2^3: mod_base = OTHER; note = Phosphorothioate bond
  modified_base 3: mod_base = um
  modified_base 4: mod_base = um
  modified_base 5: mod_base = gm
  modified_base 6: mod_base = OTHER; note = 2'-O-methyl-adenosine
  modified_base 7: mod_base = um
  modified_base 8: mod_base = OTHER; note = 2'-O-methyl-adenosine
  modified_base 9: mod_base = OTHER; note = 2'-Fluoro-adenosine
  modified_base 10: mod_base = OTHER; note = 2'-Fluoro-guanosine
  modified_base 11: mod_base = OTHER; note = 2'-Fluoro-adenosine
  modified_base 12: mod_base = um
  modified_base 13: mod_base = um
  modified_base 14: mod_base = cm
  modified_base 15: mod_base = gm
  modified_base 16: mod_base = OTHER; note = 2'-O-methyl-adenosine
  modified_base 17: mod_base = cm
  modified_base 18: mod_base = gm
  modified_base 19: mod_base = OTHER; note = 2'-O-methyl-adenosine
  modified_base 20: mod_base = OTHER; note = 2'-O-methyl-adenosine
  modified_base 21: mod_base = OTHER; note = 2'-O-methyl-adenosine
cattgataagattcgacgaaa

SEQ ID NO: 1008 - RNA, 21 nt, synthetic construct
  source 1..21: mol_type = other RNA
  modified_base <1: mod_base = OTHER; note = two inverted abasic nucleosides
  modified_base 1: mod_base = gm
  modified_base 1^2: mod_base = OTHER; note = Phosphorothioate bond
  modified_base 2: mod_base = cm
  modified_base 2^3: mod_base = OTHER; note = Phosphorothioate bond
  modified_base 3: mod_base = OTHER; note = 2'-O-methyl-adenosine
  modified_base 4: mod_base = um
  modified_base 5: mod_base = gm
  modified_base 6: mod_base = OTHER; note = 2'-O-methyl-adenosine
  modified_base 7: mod_base = OTHER; note = 2'-O-methyl-adenosine
  modified_base 8: mod_base = OTHER; note = 2'-O-methyl-adenosine
  modified_base 9: mod_base = OTHER; note = 2'-Fluoro-uridine
  modified_base 10: mod_base = OTHER; note = 2'-Fluoro-cytidine
  modified_base 11: mod_base = OTHER; note = 2'-Fluoro-cytidine
  modified_base 12: mod_base = um
  modified_base 13: mod_base = cm
  modified_base 14: mod_base = OTHER; note = 2'-O-methyl-adenosine
  modified_base 15: mod_base = OTHER; note = 2'-O-methyl-adenosine
  modified_base 16: mod_base = um
  modified_base 17: mod_base = um
  modified_base 18: mod_base = um
  modified_base 19: mod_base = cm
  modified_base 20: mod_base = cm
  modified_base 21: mod_base = OTHER; note = 2'-O-methyl-adenosine
gcatgaaatcctcaatttcca

SEQ ID NO: 1009 - RNA, 21 nt, synthetic construct
  source 1..21: mol_type = other RNA
  modified_base <1: mod_base = OTHER; note = two inverted abasic nucleosides
  modified_base 1: mod_base = OTHER; note = 2'-O-methyl-adenosine
  modified_base 1^2: mod_base = OTHER; note = Phosphorothioate bond
  modified_base 2: mod_base = OTHER; note = 2'-O-methyl-adenosine
  modified_base 2^3: mod_base = OTHER; note = Phosphorothioate bond
  modified_base 3: mod_base = OTHER; note = 2'-O-methyl-adenosine
  modified_base 4: mod_base = OTHER; note = 2'-O-methyl-adenosine
  modified_base 5: mod_base = um
  modified_base 6: mod_base = gm
  modified_base 7: mod_base = um
  modified_base 8: mod_base = OTHER; note = 2'-O-methyl-adenosine
  modified_base 9: mod_base = OTHER; note = 2'-Fluoro-uridine
  modified_base 10: mod_base = OTHER; note = 2'-Fluoro-cytidine
  modified_base 11: mod_base = OTHER; note = 2'-Fluoro-adenosine
  modified_base 12: mod_base = OTHER; note = 2'-O-methyl-adenosine
  modified_base 13: mod_base = gm
  modified_base 14: mod_base = cm
  modified_base 15: mod_base = um
  modified_base 16: mod_base = cm
  modified_base 17: mod_base = um
  modified_base 18: mod_base = OTHER; note = 2'-O-methyl-adenosine
  modified_base 19: mod_base = cm
  modified_base 20: mod_base = um
  modified_base 21: mod_base = um
aaaatgtatcaagctctactt

SEQ ID NO: 1010 - RNA, 21 nt, synthetic construct
  source 1..21: mol_type = other RNA
  modified_base <1: mod_base = OTHER; note = two inverted abasic nucleosides
  modified_base 1: mod_base = um
  modified_base 1^2: mod_base = OTHER; note = Phosphorothioate bond
  modified_base 2: mod_base = gm
  modified_base 2^3: mod_base = OTHER; note = Phosphorothioate bond
  modified_base 3: mod_base = cm
  modified_base 4: mod_base = um
  modified_base 5: mod_base = OTHER; note = 2'-O-methyl-adenosine
  modified_base 6: mod_base = cm
  modified_base 7: mod_base = um
  modified_base 8: mod_base = OTHER; note = 2'-O-methyl-adenosine
  modified_base 9: mod_base = OTHER; note = 2'-Fluoro-adenosine
  modified_base 10: mod_base = OTHER; note = 2'-Fluoro-guanosine
  modified_base 11: mod_base = OTHER; note = 2'-Fluoro-cytidine
  modified_base 12: mod_base = OTHER; note = 2'-O-methyl-adenosine
  modified_base 13: mod_base = cm
  modified_base 14: mod_base = OTHER; note = 2'-O-methyl-adenosine
  modified_base 15: mod_base = OTHER; note = 2'-O-methyl-adenosine
  modified_base 16: mod_base = um
  modified_base 17: mod_base = um
  modified_base 18: mod_base = cm
  modified_base 19: mod_base = cm
  modified_base 20: mod_base = OTHER; note = 2'-O-methyl-adenosine
  modified_base 21: mod_base = OTHER; note = 2'-O-methyl-adenosine
tgctactaagcacaattccaa

SEQ ID NO: 1011 - RNA, 21 nt, synthetic construct
  source 1..21: mol_type = other RNA
  modified_base <1: mod_base = OTHER; note = two inverted abasic nucleosides
  modified_base 1: mod_base = gm
  modified_base 1^2: mod_base = OTHER; note = Phosphorothioate bond
  modified_base 2: mod_base = um
  modified_base 2^3: mod_base = OTHER; note = Phosphorothioate bond
  modified_base 3: mod_base = OTHER; note = 2'-O-methyl-adenosine
  modified_base 4: mod_base = cm
  modified_base 5: mod_base = um
  modified_base 6: mod_base = gm
  modified_base 7: mod_base = um
  modified_base 8: mod_base = gm
  modified_base 9: mod_base = OTHER; note = 2'-Fluoro-guanosine
  modified_base 10: mod_base = OTHER; note = 2'-Fluoro-guanosine
  modified_base 11: mod_base = OTHER; note = 2'-Fluoro-adenosine
  modified_base 12: mod_base = um
  modified_base 13: mod_base = cm
  modified_base 14: mod_base = um
  modified_base 15: mod_base = OTHER; note = 2'-O-methyl-adenosine
  modified_base 16: mod_base = um
  modified_base 17: mod_base = cm
  modified_base 18: mod_base = um
  modified_base 19: mod_base = gm
  modified_base 20: mod_base = um
  modified_base 21: mod_base = OTHER; note = 2'-O-methyl-adenosine
gtactgtgggatctatctgta

SEQ ID NO: 1012 - RNA, 21 nt, synthetic construct
  source 1..21: mol_type = other RNA
  modified_base <1: mod_base = OTHER; note = two inverted abasic nucleosides
  modified_base 1: mod_base = OTHER; note = 2'-O-methyl-adenosine
  modified_base 1^2: mod_base = OTHER; note = Phosphorothioate bond
  modified_base 2: mod_base = gm
  modified_base 2^3: mod_base = OTHER; note = Phosphorothioate bond
  modified_base 3: mod_base = gm
  modified_base 4: mod_base = OTHER; note = 2'-O-methyl-adenosine
  modified_base 5: mod_base = gm
  modified_base 6: mod_base = gm
  modified_base 7: mod_base = OTHER; note = 2'-O-methyl-adenosine
  modified_base 8: mod_base = OTHER; note = 2'-O-methyl-adenosine
  modified_base 9: mod_base = OTHER; note = 2'-Fluoro-adenosine
  modified_base 10: mod_base = OTHER; note = 2'-Fluoro-uridine
  modified_base 11: mod_base = OTHER; note = 2'-Fluoro-adenosine
  modified_base 12: mod_base = gm
  modified_base 13: mod_base = cm
  modified_base 14: mod_base = OTHER; note = 2'-O-methyl-adenosine
  modified_base 15: mod_base = OTHER; note = 2'-O-methyl-adenosine
  modified_base 16: mod_base = OTHER; note = 2'-O-methyl-adenosine
  modified_base 17: mod_base = OTHER; note = 2'-O-methyl-adenosine
  modified_base 18: mod_base = um
  modified_base 19: mod_base = OTHER; note = 2'-O-methyl-adenosine
  modified_base 20: mod_base = OTHER; note = 2'-O-methyl-adenosine
  modified_base 21: mod_base = OTHER; note = 2'-O-methyl-adenosine
aggaggaaatagcaaaataaa

SEQ ID NO: 1013 - RNA, 21 nt, synthetic construct
  source 1..21: mol_type = other RNA
  modified_base <1: mod_base = OTHER; note = two inverted abasic nucleosides
  modified_base 1: mod_base = gm
  modified_base 1^2: mod_base = OTHER; note = Phosphorothioate bond
  modified_base 2: mod_base = OTHER; note = 2'-O-methyl-adenosine
  modified_base 2^3: mod_base = OTHER; note = Phosphorothioate bond
  modified_base 3: mod_base = OTHER; note = 2'-O-methyl-adenosine
  modified_base 4: mod_base = OTHER; note = 2'-O-methyl-adenosine
  modified_base 5: mod_base = um
  modified_base 6: mod_base = gm
  modified_base 7: mod_base = OTHER; note = 2'-O-methyl-adenosine
  modified_base 8: mod_base = um
  modified_base 9: mod_base = OTHER; note = 2'-Fluoro-uridine
  modified_base 10: mod_base = OTHER; note = 2'-Fluoro-guanosine
  modified_base 11: mod_base = OTHER; note = 2'-Fluoro-cytidine
  modified_base 12: mod_base = OTHER; note = 2'-O-methyl-adenosine
  modified_base 13: mod_base = um
  modified_base 14: mod_base = cm
  modified_base 15: mod_base = OTHER; note = 2'-O-methyl-adenosine
  modified_base 16: mod_base = um
  modified_base 17: mod_base = um
  modified_base 18: mod_base = gm
  modified_base 19: mod_base = OTHER; note = 2'-O-methyl-adenosine
  modified_base 20: mod_base = um
  modified_base 21: mod_base = OTHER; note = 2'-O-methyl-adenosine
gaaatgattgcatcattgata

SEQ ID NO: 1014 - RNA, 21 nt, synthetic construct
  source 1..21: mol_type = other RNA
  modified_base <1: mod_base = OTHER; note = two inverted abasic nucleosides
  modified_base 1: mod_base = cm
  modified_base 1^2: mod_base = OTHER; note = Phosphorothioate bond
  modified_base 2: mod_base = OTHER; note = 2'-O-methyl-adenosine
  modified_base 2^3: mod_base = OTHER; note = Phosphorothioate bond
  modified_base 3: mod_base = OTHER; note = 2'-O-methyl-adenosine
  modified_base 4: mod_base = gm
  modified_base 5: mod_base = um
  modified_base 6: mod_base = cm
  modified_base 7: mod_base = OTHER; note = 2'-O-methyl-adenosine
  modified_base 8: mod_base = cm
  modified_base 9: mod_base = OTHER; note = 2'-Fluoro-uridine
  modified_base 10: mod_base = OTHER; note = 2'-Fluoro-guanosine
  modified_base 11: mod_base = OTHER; note = 2'-Fluoro-cytidine
  modified_base 12: mod_base = OTHER; note = 2'-O-methyl-adenosine
  modified_base 13: mod_base = gm
  modified_base 14: mod_base = um
  modified_base 15: mod_base = gm
  modified_base 16: mod_base = um
  modified_base 17: mod_base = OTHER; note = 2'-O-methyl-adenosine
  modified_base 18: mod_base = OTHER; note = 2'-O-methyl-adenosine
  modified_base 19: mod_base = OTHER; note = 2'-O-methyl-adenosine
  modified_base 20: mod_base = OTHER; note = 2'-O-methyl-adenosine
  modified_base 21: mod_base = um
caagtcactgcagtgtaaaat

SEQ ID NO: 1015 - RNA, 21 nt, synthetic construct
  source 1..21: mol_type = other RNA
  modified_base <1: mod_base = OTHER; note = two inverted abasic nucleosides
  modified_base 1: mod_base = gm
  modified_base 1^2: mod_base = OTHER; note = Phosphorothioate bond
  modified_base 2: mod_base = um
  modified_base 2^3: mod_base = OTHER; note = Phosphorothioate bond
  modified_base 3: mod_base = cm
  modified_base 4: mod_base = cm
  modified_base 5: mod_base = OTHER; note = 2'-O-methyl-adenosine
  modified_base 6: mod_base = gm
  modified_base 7: mod_base = cm
  modified_base 8: mod_base = um
  modified_base 9: mod_base = OTHER; note = 2'-Fluoro-adenosine
  modified_base 10: mod_base = OTHER; note = 2'-Fluoro-adenosine
  modified_base 11: mod_base = OTHER; note = 2'-Fluoro-guanosine
  modified_base 12: mod_base = OTHER; note = 2'-O-methyl-adenosine
  modified_base 13: mod_base = um
  modified_base 14: mod_base = um
  modified_base 15: mod_base = um
  modified_base 16: mod_base = OTHER; note = 2'-O-methyl-adenosine
  modified_base 17: mod_base = um
  modified_base 18: mod_base = cm
  modified_base 19: mod_base = OTHER; note = 2'-O-methyl-adenosine
  modified_base 20: mod_base = gm
  modified_base 21: mod_base = OTHER; note = 2'-O-methyl-adenosine
gtccagctaagatttatcaga

SEQ ID NO: 1016 - RNA, 21 nt, synthetic construct
  source 1..21: mol_type = other RNA
  modified_base <1: mod_base = OTHER; note = two inverted abasic nucleosides
  modified_base 1: mod_base = um
  modified_base 1^2: mod_base = OTHER; note = Phosphorothioate bond
  modified_base 2: mod_base = gm
  modified_base 2^3: mod_base = OTHER; note = Phosphorothioate bond
  modified_base 3: mod_base = cm
  modified_base 4: mod_base = OTHER; note = 2'-O-methyl-adenosine
  modified_base 5: mod_base = um
  modified_base 6: mod_base = cm
  modified_base 7: mod_base = OTHER; note = 2'-O-methyl-adenosine
  modified_base 8: mod_base = um
  modified_base 9: mod_base = OTHER; note = 2'-Fluoro-uridine
  modified_base 10: mod_base = OTHER; note = 2'-Fluoro-guanosine
  modified_base 11: mod_base = OTHER; note = 2'-Fluoro-adenosine
  modified_base 12: mod_base = um
  modified_base 13: mod_base = OTHER; note = 2'-O-methyl-adenosine
  modified_base 14: mod_base = OTHER; note = 2'-O-methyl-adenosine
  modified_base 15: mod_base = gm
  modified_base 16: mod_base = OTHER; note = 2'-O-methyl-adenosine
  modified_base 17: mod_base = um
  modified_base 18: mod_base = um
  modified_base 19: mod_base = cm
  modified_base 20: mod_base = gm
  modified_base 21: mod_base = OTHER; note = 2'-O-methyl-adenosine
tgcatcattgataagattcga

SEQ ID NO: 1017 - RNA, 21 nt, synthetic construct
  source 1..21: mol_type = other RNA
  modified_base <1: mod_base = OTHER; note = two inverted abasic nucleosides
  modified_base 1: mod_base = gm
  modified_base 1^2: mod_base = OTHER; note = Phosphorothioate bond
  modified_base 2: mod_base = um
  modified_base 2^3: mod_base = OTHER; note = Phosphorothioate bond
  modified_base 3: mod_base = um
  modified_base 4: mod_base = OTHER; note = 2'-O-methyl-adenosine
  modified_base 5: mod_base = OTHER; note = 2'-O-methyl-adenosine
  modified_base 6: mod_base = gm
  modified_base 7: mod_base = um
  modified_base 8: mod_base = OTHER; note = 2'-O-methyl-adenosine
  modified_base 9: mod_base = OTHER; note = 2'-Fluoro-guanosine
  modified_base 10: mod_base = OTHER; note = 2'-Fluoro-cytidine
  modified_base 11: mod_base = OTHER; note = 2'-Fluoro-adenosine
  modified_base 12: mod_base = um
  modified_base 13: mod_base = gm
  modified_base 14: mod_base = OTHER; note = 2'-O-methyl-adenosine
  modified_base 15: mod_base = OTHER; note = 2'-O-methyl-adenosine
  modified_base 16: mod_base = OTHER; note = 2'-O-methyl-adenosine
  modified_base 17: mod_base = um
  modified_base 18: mod_base = cm
  modified_base 19: mod_base = cm
  modified_base 20: mod_base = um
  modified_base 21: mod_base = cm
gttaagtagcatgaaatcctc

SEQ ID NO: 1018 - RNA, 21 nt, synthetic construct
  source 1..21: mol_type = other RNA
  modified_base <1: mod_base = OTHER; note = two inverted abasic nucleosides
  modified_base 1: mod_base = um
  modified_base 1^2: mod_base = OTHER; note = Phosphorothioate bond
  modified_base 2: mod_base = OTHER; note = 2'-O-methyl-adenosine
  modified_base 2^3: mod_base = OTHER; note = Phosphorothioate bond
  modified_base 3: mod_base = OTHER; note = 2'-O-methyl-adenosine
  modified_base 4: mod_base = um
  modified_base 5: mod_base = OTHER; note = 2'-O-methyl-adenosine
  modified_base 6: mod_base = OTHER; note = 2'-O-methyl-adenosine
  modified_base 7: mod_base = cm
  modified_base 8: mod_base = OTHER; note = 2'-O-methyl-adenosine
  modified_base 9: mod_base = OTHER; note = 2'-Fluoro-guanosine
  modified_base 10: mod_base = OTHER; note = 2'-Fluoro-adenosine
  modified_base 11: mod_base = OTHER; note = 2'-Fluoro-uridine
  modified_base 12: mod_base = cm
  modified_base 13: mod_base = cm
  modified_base 14: mod_base = OTHER; note = 2'-O-methyl-adenosine
  modified_base 15: mod_base = cm
  modified_base 16: mod_base = gm
  modified_base 17: mod_base = cm
  modified_base 18: mod_base = um
  modified_base 19: mod_base = um
  modified_base 20: mod_base = um
  modified_base 21: mod_base = cm
taataacagatccacgctttc

SEQ ID NO: 1019 - RNA, 21 nt, synthetic construct
  source 1..21: mol_type = other RNA
  modified_base <1: mod_base = OTHER; note = two inverted abasic nucleosides
  modified_base 1: mod_base = gm
  modified_base 1^2: mod_base = OTHER; note = Phosphorothioate bond
  modified_base 2: mod_base = OTHER; note = 2'-O-methyl-adenosine
  modified_base 2^3: mod_base = OTHER; note = Phosphorothioate bond
  modified_base 3: mod_base = OTHER; note = 2'-O-methyl-adenosine
  modified_base 4: mod_base = OTHER; note = 2'-O-methyl-adenosine
  modified_base 5: mod_base = OTHER; note = 2'-O-methyl-adenosine
  modified_base 6: mod_base = um
  modified_base 7: mod_base = gm
  modified_base 8: mod_base = um
  modified_base 9: mod_base = OTHER; note = 2'-Fluoro-adenosine
  modified_base 10: mod_base = OTHER; note = 2'-Fluoro-uridine
  modified_base 11: mod_base = OTHER; note = 2'-Fluoro-cytidine
  modified_base 12: mod_base = OTHER; note = 2'-O-methyl-adenosine
  modified_base 13: mod_base = OTHER; note = 2'-O-methyl-adenosine
  modified_base 14: mod_base = gm
  modified_base 15: mod_base = cm
  modified_base 16: mod_base = um
  modified_base 17: mod_base = cm
  modified_base 18: mod_base = um
  modified_base 19: mod_base = OTHER; note = 2'-O-methyl-adenosine
  modified_base 20: mod_base = cm
  modified_base 21: mod_base = um
gaaaatgtatcaagctctact

SEQ ID NO: 1020 - RNA, 21 nt, synthetic construct
  source 1..21: mol_type = other RNA
  modified_base <1: mod_base = OTHER; note = two inverted abasic nucleosides
  modified_base 1: mod_base = cm
  modified_base 1^2: mod_base = OTHER; note = Phosphorothioate bond
  modified_base 2: mod_base = cm
  modified_base 2^3: mod_base = OTHER; note = Phosphorothioate bond
  modified_base 3: mod_base = OTHER; note = 2'-O-methyl-adenosine
  modified_base 4: mod_base = um
  modified_base 5: mod_base = gm
  modified_base 6: mod_base = gm
  modified_base 7: mod_base = gm
  modified_base 8: mod_base = um
  modified_base 9: mod_base = OTHER; note = 2'-Fluoro-uridine
  modified_base 10: mod_base = OTHER; note = 2'-Fluoro-uridine
  modified_base 11: mod_base = OTHER; note = 2'-Fluoro-adenosine
  modified_base 12: mod_base = um
  modified_base 13: mod_base = OTHER; note = 2'-O-methyl-adenosine
  modified_base 14: mod_base = um
  modified_base 15: mod_base = OTHER; note = 2'-O-methyl-adenosine
  modified_base 16: mod_base = um
  modified_base 17: mod_base = gm
  modified_base 18: mod_base = gm
  modified_base 19: mod_base = OTHER; note = 2'-O-methyl-adenosine
  modified_base 20: mod_base = um
  modified_base 21: mod_base = um
ccatgggtttatatatggatt

SEQ ID NO: 1021 - RNA, 21 nt, synthetic construct
  source 1..21: mol_type = other RNA
  modified_base <1: mod_base = OTHER; note = two inverted abasic nucleosides
  modified_base 1: mod_base = OTHER; note = 2'-O-methyl-adenosine
  modified_base 1^2: mod_base = OTHER; note = Phosphorothioate bond
  modified_base 2: mod_base = OTHER; note = 2'-O-methyl-adenosine
  modified_base 2^3: mod_base = OTHER; note = Phosphorothioate bond
  modified_base 3: mod_base = OTHER; note = 2'-O-methyl-adenosine
  modified_base 4: mod_base = um
  modified_base 5: mod_base = gm
  modified_base 6: mod_base = um
  modified_base 7: mod_base = OTHER; note = 2'-O-methyl-adenosine
  modified_base 8: mod_base = um
  modified_base 9: mod_base = OTHER; note = 2'-Fluoro-cytidine
  modified_base 10: mod_base = OTHER; note = 2'-Fluoro-adenosine
  modified_base 11: mod_base = OTHER; note = 2'-Fluoro-adenosine
  modified_base 12: mod_base = gm
  modified_base 13: mod_base = cm
  modified_base 14: mod_base = um
  modified_base 15: mod_base = cm
  modified_base 16: mod_base = um
  modified_base 17: mod_base = OTHER; note = 2'-O-methyl-adenosine
  modified_base 18: mod_base = cm
  modified_base 19: mod_base = um
  modified_base 20: mod_base = um
  modified_base 21: mod_base = um
aaatgtatcaagctctacttt

SEQ ID NO: 1022 - RNA, 21 nt, synthetic construct
  source 1..21: mol_type = other RNA
  modified_base <1: mod_base = OTHER; note = two inverted abasic nucleosides
  modified_base 1: mod_base = um
  modified_base 1^2: mod_base = OTHER; note = Phosphorothioate bond
  modified_base 2: mod_base = cm
  modified_base 2^3: mod_base = OTHER; note = Phosphorothioate bond
  modified_base 3: mod_base = cm
  modified_base 4: mod_base = gm
  modified_base 5: mod_base = um
  modified_base 6: mod_base = um
  modified_base 7: mod_base = OTHER; note = 2'-O-methyl-adenosine
  modified_base 8: mod_base = OTHER; note = 2'-O-methyl-adenosine
  modified_base 9: mod_base = OTHER; note = 2'-Fluoro-guanosine
  modified_base 10: mod_base = OTHER; note = 2'-Fluoro-uridine
  modified_base 11: mod_base = OTHER; note = 2'-Fluoro-adenosine
  modified_base 12: mod_base = gm
  modified_base 13: mod_base = cm
  modified_base 14: mod_base = OTHER; note = 2'-O-methyl-adenosine
  modified_base 15: mod_base = um
  modified_base 16: mod_base = gm
  modified_base 17: mod_base = OTHER; note = 2'-O-methyl-adenosine
  modified_base 18: mod_base = OTHER; note = 2'-O-methyl-adenosine
  modified_base 19: mod_base = OTHER; note = 2'-O-methyl-adenosine
  modified_base 20: mod_base = um
  modified_base 21: mod_base = cm
tccgttaagtagcatgaaatc

SEQ ID NO: 1023 - RNA, 21 nt, synthetic construct
  source 1..21: mol_type = other RNA
  modified_base <1: mod_base = OTHER; note = two inverted abasic nucleosides
  modified_base 1: mod_base = OTHER; note = 2'-O-methyl-adenosine
  modified_base 1^2: mod_base = OTHER; note = Phosphorothioate bond
  modified_base 2: mod_base = um
  modified_base 2^3: mod_base = OTHER; note = Phosphorothioate bond
  modified_base 3: mod_base = OTHER; note = 2'-O-methyl-adenosine
  modified_base 4: mod_base = OTHER; note = 2'-O-methyl-adenosine
  modified_base 5: mod_base = OTHER; note = 2'-O-methyl-adenosine
  modified_base 6: mod_base = gm
  modified_base 7: mod_base = OTHER; note = 2'-O-methyl-adenosine
  modified_base 8: mod_base = cm
  modified_base 9: mod_base = OTHER; note = 2'-Fluoro-uridine
  modified_base 10: mod_base = OTHER; note = 2'-Fluoro-adenosine
  modified_base 11: mod_base = OTHER; note = 2'-Fluoro-uridine
  modified_base 12: mod_base = um
  modified_base 13: mod_base = OTHER; note = 2'-O-methyl-adenosine
  modified_base 14: mod_base = um
  modified_base 15: mod_base = um
  modified_base 16: mod_base = cm
  modified_base 17: mod_base = cm
  modified_base 18: mod_base = cm
  modified_base 19: mod_base = um
  modified_base 20: mod_base = OTHER; note = 2'-O-methyl-adenosine
  modified_base 21: mod_base = um
ataaagactattattccctat

SEQ ID NO: 1024 - RNA, 21 nt, synthetic construct
  source 1..21: mol_type = other RNA
  modified_base <1: mod_base = OTHER; note = two inverted abasic nucleosides
  modified_base 1: mod_base = gm
  modified_base 1^2: mod_base = OTHER; note = Phosphorothioate bond
  modified_base 2: mod_base = OTHER; note = 2'-O-methyl-adenosine
  modified_base 2^3: mod_base = OTHER; note = Phosphorothioate bond
  modified_base 3: mod_base = OTHER; note = 2'-O-methyl-adenosine
  modified_base 4: mod_base = OTHER; note = 2'-O-methyl-adenosine
  modified_base 5: mod_base = gm
  modified_base 6: mod_base = um
  modified_base 7: mod_base = um
  modified_base 8: mod_base = um
  modified_base 9: mod_base = OTHER; note = 2'-Fluoro-uridine
  modified_base 10: mod_base = OTHER; note = 2'-Fluoro-guanosine
  modified_base 11: mod_base = OTHER; note = 2'-Fluoro-cytidine
  modified_base 12: mod_base = um
  modified_base 13: mod_base = gm
  modified_base 14: mod_base = cm
  modified_base 15: mod_base = um
  modified_base 16: mod_base = OTHER; note = 2'-O-methyl-adenosine
  modified_base 17: mod_base = cm
  modified_base 18: mod_base = um
  modified_base 19: mod_base = OTHER; note = 2'-O-methyl-adenosine
  modified_base 20: mod_base = OTHER; note = 2'-O-methyl-adenosine
  modified_base 21: mod_base = gm
gaaagttttgctgctactaag

SEQ ID NO: 1025 - RNA, 21 nt, synthetic construct
  source 1..21: mol_type = other RNA
  modified_base <1: mod_base = OTHER; note = two inverted abasic nucleosides
  modified_base 1: mod_base = cm
  modified_base 1^2: mod_base = OTHER; note = Phosphorothioate bond
  modified_base 2: mod_base = um
  modified_base 2^3: mod_base = OTHER; note = Phosphorothioate bond
  modified_base 3: mod_base = cm
  modified_base 4: mod_base = cm
  modified_base 5: mod_base = um
  modified_base 6: mod_base = cm
  modified_base 7: mod_base = um
  modified_base 8: mod_base = cm
  modified_base 9: mod_base = OTHER; note = 2'-Fluoro-uridine
  modified_base 10: mod_base = OTHER; note = 2'-Fluoro-cytidine
  modified_base 11: mod_base = OTHER; note = 2'-Fluoro-adenosine
  modified_base 12: mod_base = OTHER; note = 2'-O-methyl-adenosine
  modified_base 13: mod_base = gm
  modified_base 14: mod_base = um
  modified_base 15: mod_base = cm
  modified_base 16: mod_base = cm
  modified_base 17: mod_base = gm
  modified_base 18: mod_base = um
  modified_base 19: mod_base = um
  modified_base 20: mod_base = OTHER; note = 2'-O-methyl-adenosine
  modified_base 21: mod_base = OTHER; note = 2'-O-methyl-adenosine
ctcctctctcaagtccgttaa

SEQ ID NO: 1026 - RNA, 21 nt, synthetic construct
  source 1..21: mol_type = other RNA
  modified_base <1: mod_base = OTHER; note = two inverted abasic nucleosides
  modified_base 1: mod_base = OTHER; note = 2'-O-methyl-adenosine
  modified_base 1^2: mod_base = OTHER; note = Phosphorothioate bond
  modified_base 2: mod_base = gm
  modified_base 2^3: mod_base = OTHER; note = Phosphorothioate bond
  modified_base 3: mod_base = gm
  modified_base 4: mod_base = OTHER; note = 2'-O-methyl-adenosine
  modified_base 5: mod_base = cm
  modified_base 6: mod_base = cm
  modified_base 7: mod_base = gm
  modified_base 8: mod_base = OTHER; note = 2'-O-methyl-adenosine
  modified_base 9: mod_base = OTHER; note = 2'-Fluoro-uridine
  modified_base 10: mod_base = OTHER; note = 2'-Fluoro-guanosine
  modified_base 11: mod_base = OTHER; note = 2'-Fluoro-adenosine
  modified_base 12: mod_base = gm
  modified_base 13: mod_base = OTHER; note = 2'-O-methyl-adenosine
  modified_base 14: mod_base = OTHER; note = 2'-O-methyl-adenosine
  modified_base 15: mod_base = um
  modified_base 16: mod_base = OTHER; note = 2'-O-methyl-adenosine
  modified_base 17: mod_base = OTHER; note = 2'-O-methyl-adenosine
  modified_base 18: mod_base = cm
  modified_base 19: mod_base = um
  modified_base 20: mod_base = OTHER; note = 2'-O-methyl-adenosine
  modified_base 21: mod_base = cm
aggaccgatgagaataactac

SEQ ID NO: 1027 - RNA, 21 nt, synthetic construct
  source 1..21: mol_type = other RNA
  modified_base <1: mod_base = OTHER; note = two inverted abasic nucleosides
  modified_base 1: mod_base = um
  modified_base 1^2: mod_base = OTHER; note = Phosphorothioate bond
  modified_base 2: mod_base = OTHER; note = 2'-O-methyl-adenosine
  modified_base 2^3: mod_base = OTHER; note = Phosphorothioate bond
  modified_base 3: mod_base = cm
  modified_base 4: mod_base = OTHER; note = 2'-O-methyl-adenosine
  modified_base 5: mod_base = cm
  modified_base 6: mod_base = cm
  modified_base 7: mod_base = OTHER; note = 2'-O-methyl-adenosine
  modified_base 8: mod_base = um
  modified_base 9: mod_base = OTHER; note = 2'-Fluoro-cytidine
  modified_base 10: mod_base = OTHER; note = 2'-Fluoro-adenosine
  modified_base 11: mod_base = OTHER; note = 2'-Fluoro-uridine
  modified_base 12: mod_base = gm
  modified_base 13: mod_base = OTHER; note = 2'-O-methyl-adenosine
  modified_base 14: mod_base = OTHER; note = 2'-O-methyl-adenosine
  modified_base 15: mod_base = OTHER; note = 2'-O-methyl-adenosine
  modified_base 16: mod_base = gm
  modified_base 17: mod_base = um
  modified_base 18: mod_base = um
  modified_base 19: mod_base = um
  modified_base 20: mod_base = um
  modified_base 21: mod_base = gm
tacaccatcatgaaagttttg

SEQ ID NO: 1028 - RNA, 21 nt, synthetic construct
  source 1..21: mol_type = other RNA
  modified_base <1: mod_base = OTHER; note = two inverted abasic nucleosides
  modified_base 1: mod_base = um
  modified_base 1^2: mod_base = OTHER; note = Phosphorothioate bond
  modified_base 2: mod_base = um
  modified_base 2^3: mod_base = OTHER; note = Phosphorothioate bond
  modified_base 3: mod_base = gm
  modified_base 4: mod_base = OTHER; note = 2'-O-methyl-adenosine
  modified_base 5: mod_base = OTHER; note = 2'-O-methyl-adenosine
  modified_base 6: mod_base = gm
  modified_base 7: mod_base = OTHER; note = 2'-O-methyl-adenosine
  modified_base 8: mod_base = OTHER; note = 2'-O-methyl-adenosine
  modified_base 9: mod_base = OTHER; note = 2'-Fluoro-adenosine
  modified_base 10: mod_base = OTHER; note = 2'-Fluoro-uridine
  modified_base 11: mod_base = OTHER; note = 2'-Fluoro-guanosine
  modified_base 12: mod_base = OTHER; note = 2'-O-methyl-adenosine
  modified_base 13: mod_base = gm
  modified_base 14: mod_base = gm
  modified_base 15: mod_base = OTHER; note = 2'-O-methyl-adenosine
  modified_base 16: mod_base = cm
  modified_base 17: mod_base = OTHER; note = 2'-O-methyl-adenosine
  modified_base 18: mod_base = OTHER; note = 2'-O-methyl-adenosine
  modified_base 19: mod_base = OTHER; note = 2'-O-methyl-adenosine
  modified_base 20: mod_base = um
  modified_base 21: mod_base = um
ttgaagaaatgaggacaaatt

SEQ ID NO: 1029 - RNA, 21 nt, synthetic construct
  source 1..21: mol_type = other RNA
  modified_base <1: mod_base = OTHER; note = two inverted abasic nucleosides
  modified_base 1: mod_base = gm
  modified_base 1^2: mod_base = OTHER; note = Phosphorothioate bond
  modified_base 2: mod_base = gm
  modified_base 2^3: mod_base = OTHER; note = Phosphorothioate bond
  modified_base 3: mod_base = OTHER; note = 2'-O-methyl-adenosine
  modified_base 4: mod_base = um
  modified_base 5: mod_base = gm
  modified_base 6: mod_base = OTHER; note = 2'-O-methyl-adenosine
  modified_base 7: mod_base = um
  modified_base 8: mod_base = OTHER; note = 2'-O-methyl-adenosine
  modified_base 9: mod_base = OTHER; note = 2'-Fluoro-adenosine
  modified_base 10: mod_base = OTHER; note = 2'-Fluoro-adenosine
  modified_base 11: mod_base = OTHER; note = 2'-Fluoro-guanosine
  modified_base 12: mod_base = OTHER; note = 2'-O-methyl-adenosine
  modified_base 13: mod_base = cm
  modified_base 14: mod_base = um
  modified_base 15: mod_base = OTHER; note = 2'-O-methyl-adenosine
  modified_base 16: mod_base = um
  modified_base 17: mod_base = um
  modified_base 18: mod_base = OTHER; note = 2'-O-methyl-adenosine
  modified_base 19: mod_base = um
  modified_base 20: mod_base = um
  modified_base 21: mod_base = cm
ggatgataaagactattattc

SEQ ID NO: 1030 - RNA, 21 nt, synthetic construct
  source 1..21: mol_type = other RNA
  modified_base <1: mod_base = OTHER; note = two inverted abasic nucleosides
  modified_base 1: mod_base = um
  modified_base 1^2: mod_base = OTHER; note = Phosphorothioate bond
  modified_base 2: mod_base = OTHER; note = 2'-O-methyl-adenosine
  modified_base 2^3: mod_base = OTHER; note = Phosphorothioate bond
  modified_base 3: mod_base = OTHER; note = 2'-O-methyl-adenosine
  modified_base 4: mod_base = OTHER; note = 2'-O-methyl-adenosine
  modified_base 5: mod_base = OTHER; note = 2'-O-methyl-adenosine
  modified_base 6: mod_base = cm
  modified_base 7: mod_base = um
  modified_base 8: mod_base = gm
  modified_base 9: mod_base = OTHER; note = 2'-Fluoro-adenosine
  modified_base 10: mod_base = OTHER; note = 2'-Fluoro-guanosine
  modified_base 11: mod_base = OTHER; note = 2'-Fluoro-cytidine
  modified_base 12: mod_base = um
  modified_base 13: mod_base = gm
  modified_base 14: mod_base = gm
  modified_base 15: mod_base = OTHER; note = 2'-O-methyl-adenosine
  modified_base 16: mod_base = OTHER; note = 2'-O-methyl-adenosine
  modified_base 17: mod_base = um
  modified_base 18: mod_base = cm
  modified_base 19: mod_base = um
  modified_base 20: mod_base = OTHER; note = 2'-O-methyl-adenosine
  modified_base 21: mod_base = OTHER; note = 2'-O-methyl-adenosine
taaaactgagctggaatctaa

SEQ ID NO: 1031 - RNA, 21 nt, synthetic construct
  source 1..21: mol_type = other RNA
  modified_base <1: mod_base = OTHER; note = two inverted abasic nucleosides
  modified_base 1: mod_base = gm
  modified_base 1^2: mod_base = OTHER; note = Phosphorothioate bond
  modified_base 2: mod_base = OTHER; note = 2'-O-methyl-adenosine
  modified_base 2^3: mod_base = OTHER; note = Phosphorothioate bond
  modified_base 3: mod_base = OTHER; note = 2'-O-methyl-adenosine
  modified_base 4: mod_base = um
  modified_base 5: mod_base = OTHER; note = 2'-O-methyl-adenosine
  modified_base 6: mod_base = OTHER; note = 2'-O-methyl-adenosine
  modified_base 7: mod_base = cm
  modified_base 8: mod_base = um
  modified_base 9: mod_base = OTHER; note = 2'-Fluoro-adenosine
  modified_base 10: mod_base = OTHER; note = 2'-Fluoro-cytidine
  modified_base 11: mod_base = OTHER; note = 2'-Fluoro-adenosine
  modified_base 12: mod_base = um
  modified_base 13: mod_base = gm
  modified_base 14: mod_base = gm
  modified_base 15: mod_base = OTHER; note = 2'-O-methyl-adenosine
  modified_base 16: mod_base = gm
  modified_base 17: mod_base = OTHER; note = 2'-O-methyl-adenosine
  modified_base 18: mod_base = um
  modified_base 19: mod_base = um
  modified_base 20: mod_base = gm
  modified_base 21: mod_base = um
gaataactacatggagattgt

SEQ ID NO: 1032 - RNA, 21 nt, synthetic construct
  source 1..21: mol_type = other RNA
  modified_base <1: mod_base = OTHER; note = two inverted abasic nucleosides
  modified_base 1: mod_base = um
  modified_base 1^2: mod_base = OTHER; note = Phosphorothioate bond
  modified_base 2: mod_base = OTHER; note = 2'-O-methyl-adenosine
  modified_base 2^3: mod_base = OTHER; note = Phosphorothioate bond
  modified_base 3: mod_base = OTHER; note = 2'-O-methyl-adenosine
  modified_base 4: mod_base = gm
  modified_base 5: mod_base = OTHER; note = 2'-O-methyl-adenosine
  modified_base 6: mod_base = gm
  modified_base 7: mod_base = OTHER; note = 2'-O-methyl-adenosine
  modified_base 8: mod_base = um
  modified_base 9: mod_base = OTHER; note = 2'-Fluoro-guanosine
  modified_base 10: mod_base = OTHER; note = 2'-Fluoro-cytidine
  modified_base 11: mod_base = OTHER; note = 2'-Fluoro-uridine
  modified_base 12: mod_base = gm
  modified_base 13: mod_base = OTHER; note = 2'-O-methyl-adenosine
  modified_base 14: mod_base = cm
  modified_base 15: mod_base = um
  modified_base 16: mod_base = OTHER; note = 2'-O-methyl-adenosine
  modified_base 17: mod_base = um
  modified_base 18: mod_base = um
  modified_base 19: mod_base = cm
  modified_base 20: mod_base = cm
  modified_base 21: mod_base = um
taagagatgctgactattcct

SEQ ID NO: 1033 - RNA, 21 nt, synthetic construct
  source 1..21: mol_type = other RNA
  modified_base <1: mod_base = OTHER; note = two inverted abasic nucleosides
  modified_base 1: mod_base = cm
  modified_base 1^2: mod_base = OTHER; note = Phosphorothioate bond
  modified_base 2: mod_base = OTHER; note = 2'-O-methyl-adenosine
  modified_base 2^3: mod_base = OTHER; note = Phosphorothioate bond
  modified_base 3: mod_base = um
  modified_base 4: mod_base = cm
  modified_base 5: mod_base = OTHER; note = 2'-O-methyl-adenosine
  modified_base 6: mod_base = um
  modified_base 7: mod_base = gm
  modified_base 8: mod_base = OTHER; note = 2'-O-methyl-adenosine
  modified_base 9: mod_base = OTHER; note = 2'-Fluoro-adenosine
  modified_base 10: mod_base = OTHER; note = 2'-Fluoro-adenosine
  modified_base 11: mod_base = OTHER; note = 2'-Fluoro-guanosine
  modified_base 12: mod_base = um
  modified_base 13: mod_base = um
  modified_base 14: mod_base = um
  modified_base 15: mod_base = um
  modified_base 16: mod_base = gm
  modified_base 17: mod_base = cm
  modified_base 18: mod_base = um
  modified_base 19: mod_base = gm
  modified_base 20: mod_base = cm
  modified_base 21: mod_base = um
catcatgaaagttttgctgct

SEQ ID NO: 1034 - RNA, 21 nt, synthetic construct
  source 1..21: mol_type = other RNA
  modified_base <1: mod_base = OTHER; note = two inverted abasic nucleosides
  modified_base 1: mod_base = um
  modified_base 1^2: mod_base = OTHER; note = Phosphorothioate bond
  modified_base 2: mod_base = OTHER; note = 2'-O-methyl-adenosine
  modified_base 2^3: mod_base = OTHER; note = Phosphorothioate bond
  modified_base 3: mod_base = cm
  modified_base 4: mod_base = OTHER; note = 2'-O-methyl-adenosine
  modified_base 5: mod_base = um
  modified_base 6: mod_base = OTHER; note = 2'-O-methyl-adenosine
  modified_base 7: mod_base = OTHER; note = 2'-O-methyl-adenosine
  modified_base 8: mod_base = OTHER; note = 2'-O-methyl-adenosine
  modified_base 9: mod_base = OTHER; note = 2'-Fluoro-adenosine
  modified_base 10: mod_base = OTHER; note = 2'-Fluoro-cytidine
  modified_base 11: mod_base = OTHER; note = 2'-Fluoro-cytidine
  modified_base 12: mod_base = OTHER; note = 2'-O-methyl-adenosine
  modified_base 13: mod_base = gm
  modified_base 14: mod_base = OTHER; note = 2'-O-methyl-adenosine
  modified_base 15: mod_base = OTHER; note = 2'-O-methyl-adenosine
  modified_base 16: mod_base = cm
  modified_base 17: mod_base = cm
  modified_base 18: mod_base = OTHER; note = 2'-O-methyl-adenosine
  modified_base 19: mod_base = gm
  modified_base 20: mod_base = OTHER; note = 2'-O-methyl-adenosine
  modified_base 21: mod_base = um
tacataaaaccagaaccagat

SEQ ID NO: 1035 - RNA, 21 nt, synthetic construct
  source 1..21: mol_type = other RNA
  modified_base <1: mod_base = OTHER; note = two inverted abasic nucleosides
  modified_base 1: mod_base = um
  modified_base 1^2: mod_base = OTHER; note = Phosphorothioate bond
  modified_base 2: mod_base = um
  modified_base 2^3: mod_base = OTHER; note = Phosphorothioate bond
  modified_base 3: mod_base = gm
  modified_base 4: mod_base = cm
  modified_base 5: mod_base = um
  modified_base 6: mod_base = gm
  modified_base 7: mod_base = cm
  modified_base 8: mod_base = um
  modified_base 9: mod_base = OTHER; note = 2'-Fluoro-adenosine
  modified_base 10: mod_base = OTHER; note = 2'-Fluoro-cytidine
  modified_base 11: mod_base = OTHER; note = 2'-Fluoro-uridine
  modified_base 12: mod_base = OTHER; note = 2'-O-methyl-adenosine
  modified_base 13: mod_base = OTHER; note = 2'-O-methyl-adenosine
  modified_base 14: mod_base = gm
  modified_base 15: mod_base = cm
  modified_base 16: mod_base = OTHER; note = 2'-O-methyl-adenosine
  modified_base 17: mod_base = cm
  modified_base 18: mod_base = OTHER; note = 2'-O-methyl-adenosine
  modified_base 19: mod_base = OTHER; note = 2'-O-methyl-adenosine
  modified_base 20: mod_base = um
  modified_base 21: mod_base = um
ttgctgctactaagcacaatt

SEQ ID NO: 1036 - RNA, 21 nt, synthetic construct
  source 1..21: mol_type = other RNA
  modified_base <1: mod_base = OTHER; note = two inverted abasic nucleosides
  modified_base 1: mod_base = cm
  modified_base 1^2: mod_base = OTHER; note = Phosphorothioate bond
  modified_base 2: mod_base = gm
  modified_base 2^3: mod_base = OTHER; note = Phosphorothioate bond
  modified_base 3: mod_base = OTHER; note = 2'-O-methyl-adenosine
  modified_base 4: mod_base = cm
  modified_base 5: mod_base = um
  modified_base 6: mod_base = gm
  modified_base 7: mod_base = cm
  modified_base 8: mod_base = OTHER; note = 2'-O-methyl-adenosine
  modified_base 9: mod_base = OTHER; note = 2'-Fluoro-guanosine
  modified_base 10: mod_base = OTHER; note = 2'-Fluoro-cytidine
  modified_base 11: mod_base = OTHER; note = 2'-Fluoro-uridine
  modified_base 12: mod_base = cm
  modified_base 13: mod_base = OTHER; note = 2'-O-methyl-adenosine
  modified_base 14: mod_base = cm
  modified_base 15: mod_base = cm
  modified_base 16: mod_base = um
  modified_base 17: mod_base = um
  modified_base 18: mod_base = um
  modified_base 19: mod_base = gm
  modified_base 20: mod_base = OTHER; note = 2'-O-methyl-adenosine
  modified_base 21: mod_base = OTHER; note = 2'-O-methyl-adenosine
cgactgcagctcacctttgaa

SEQ ID NO: 1037 - RNA, 21 nt, synthetic construct
  source 1..21: mol_type = other RNA
  modified_base <1: mod_base = OTHER; note = two inverted abasic nucleosides
  modified_base 1: mod_base = um
  modified_base 1^2: mod_base = OTHER; note = Phosphorothioate bond
  modified_base 2: mod_base = um
  modified_base 2^3: mod_base = OTHER; note = Phosphorothioate bond
  modified_base 3: mod_base = OTHER; note = 2'-O-methyl-adenosine
  modified_base 4: mod_base = OTHER; note = 2'-O-methyl-adenosine
  modified_base 5: mod_base = OTHER; note = 2'-O-methyl-adenosine
  modified_base 6: mod_base = OTHER; note = 2'-O-methyl-adenosine
  modified_base 7: mod_base = cm
  modified_base 8: mod_base = um
  modified_base 9: mod_base = OTHER; note = 2'-Fluoro-guanosine
  modified_base 10: mod_base = OTHER; note = 2'-Fluoro-adenosine
  modified_base 11: mod_base = OTHER; note = 2'-Fluoro-guanosine
  modified_base 12: mod_base = cm
  modified_base 13: mod_base = um
  modified_base 14: mod_base = gm
  modified_base 15: mod_base = gm
  modified_base 16: mod_base = OTHER; note = 2'-O-methyl-adenosine
  modified_base 17: mod_base = OTHER; note = 2'-O-methyl-adenosine
  modified_base 18: mod_base = um
  modified_base 19: mod_base = cm
  modified_base 20: mod_base = um
  modified_base 21: mod_base = OTHER; note = 2'-O-methyl-adenosine
ttaaaactgagctggaatcta

SEQ ID NO: 1038 - RNA, 21 nt, synthetic construct
  source 1..21: mol_type = other RNA
  modified_base <1: mod_base = OTHER; note = two inverted abasic nucleosides
  modified_base 1: mod_base = um
  modified_base 1^2: mod_base = OTHER; note = Phosphorothioate bond
  modified_base 2: mod_base = OTHER; note = 2'-O-methyl-adenosine
  modified_base 2^3: mod_base = OTHER; note = Phosphorothioate bond
  modified_base 3: mod_base = gm
  modified_base 4: mod_base = um
  modified_base 5: mod_base = gm
  modified_base 6: mod_base = gm
  modified_base 7: mod_base = OTHER; note = 2'-O-methyl-adenosine
  modified_base 8: mod_base = gm
  modified_base 9: mod_base = OTHER; note = 2'-Fluoro-uridine
  modified_base 10: mod_base = OTHER; note = 2'-Fluoro-cytidine
  modified_base 11: mod_base = OTHER; note = 2'-Fluoro-adenosine
  modified_base 12: mod_base = um
  modified_base 13: mod_base = gm
  modified_base 14: mod_base = gm
  modified_base 15: mod_base = OTHER; note = 2'-O-methyl-adenosine
  modified_base 16: mod_base = OTHER; note = 2'-O-methyl-adenosine
  modified_base 17: mod_base = OTHER; note = 2'-O-methyl-adenosine
  modified_base 18: mod_base = um
  modified_base 19: mod_base = cm
  modified_base 20: mod_base = OTHER; note = 2'-O-methyl-adenosine
  modified_base 21: mod_base = cm
tagtggagtcatggaaatcac

SEQ ID NO: 1039 - RNA, 21 nt, synthetic construct
  source 1..21: mol_type = other RNA
  modified_base <1: mod_base = OTHER; note = two inverted abasic nucleosides
  modified_base 1: mod_base = OTHER; note = 2'-O-methyl-adenosine
  modified_base 1^2: mod_base = OTHER; note = Phosphorothioate bond
  modified_base 2: mod_base = gm
  modified_base 2^3: mod_base = OTHER; note = Phosphorothioate bond
  modified_base 3: mod_base = um
  modified_base 4: mod_base = um
  modified_base 5: mod_base = um
  modified_base 6: mod_base = um
  modified_base 7: mod_base = gm
  modified_base 8: mod_base = cm
  modified_base 9: mod_base = OTHER; note = 2'-Fluoro-uridine
  modified_base 10: mod_base = OTHER; note = 2'-Fluoro-guanosine
  modified_base 11: mod_base = OTHER; note = 2'-Fluoro-cytidine
  modified_base 12: mod_base = um
  modified_base 13: mod_base = OTHER; note = 2'-O-methyl-adenosine
  modified_base 14: mod_base = cm
  modified_base 15: mod_base = um
  modified_base 16: mod_base = OTHER; note = 2'-O-methyl-adenosine
  modified_base 17: mod_base = OTHER; note = 2'-O-methyl-adenosine
  modified_base 18: mod_base = gm
  modified_base 19: mod_base = cm
  modified_base 20: mod_base = OTHER; note = 2'-O-methyl-adenosine
  modified_base 21: mod_base = cm
agttttgctgctactaagcac

SEQ ID NO: 1040 - RNA, 21 nt, synthetic construct
  source 1..21: mol_type = other RNA
  modified_base <1: mod_base = OTHER; note = two inverted abasic nucleosides
  modified_base 1: mod_base = um
  modified_base 1^2: mod_base = OTHER; note = Phosphorothioate bond
  modified_base 2: mod_base = gm
  modified_base 2^3: mod_base = OTHER; note = Phosphorothioate bond
  modified_base 3: mod_base = OTHER; note = 2'-O-methyl-adenosine
  modified_base 4: mod_base = OTHER; note = 2'-O-methyl-adenosine
  modified_base 5: mod_base = gm
  modified_base 6: mod_base = OTHER; note = 2'-O-methyl-adenosine
  modified_base 7: mod_base = OTHER; note = 2'-O-methyl-adenosine
  modified_base 8: mod_base = OTHER; note = 2'-O-methyl-adenosine
  modified_base 9: mod_base = OTHER; note = 2'-Fluoro-uridine
  modified_base 10: mod_base = OTHER; note = 2'-Fluoro-guanosine
  modified_base 11: mod_base = OTHER; note = 2'-Fluoro-adenosine
  modified_base 12: mod_base = gm
  modified_base 13: mod_base = gm
  modified_base 14: mod_base = OTHER; note = 2'-O-methyl-adenosine
  modified_base 15: mod_base = cm
  modified_base 16: mod_base = OTHER; note = 2'-O-methyl-adenosine
  modified_base 17: mod_base = OTHER; note = 2'-O-methyl-adenosine
  modified_base 18: mod_base = OTHER; note = 2'-O-methyl-adenosine
  modified_base 19: mod_base = um
  modified_base 20: mod_base = um
  modified_base 21: mod_base = OTHER; note = 2'-O-methyl-adenosine
tgaagaaatgaggacaaatta

SEQ ID NO: 1041 - RNA, 21 nt, synthetic construct
  source 1..21: mol_type = other RNA
  modified_base <1: mod_base = OTHER; note = two inverted abasic nucleosides
  modified_base 1: mod_base = cm
  modified_base 1^2: mod_base = OTHER; note = Phosphorothioate bond
  modified_base 2: mod_base = um
  modified_base 2^3: mod_base = OTHER; note = Phosphorothioate bond
  modified_base 3: mod_base = cm
  modified_base 4: mod_base = OTHER; note = 2'-O-methyl-adenosine
  modified_base 5: mod_base = OTHER; note = 2'-O-methyl-adenosine
  modified_base 6: mod_base = gm
  modified_base 7: mod_base = gm
  modified_base 8: mod_base = OTHER; note = 2'-O-methyl-adenosine
  modified_base 9: mod_base = OTHER; note = 2'-Fluoro-adenosine
  modified_base 10: mod_base = OTHER; note = 2'-Fluoro-guanosine
  modified_base 11: mod_base = OTHER; note = 2'-Fluoro-cytidine
  modified_base 12: mod_base = OTHER; note = 2'-O-methyl-adenosine
  modified_base 13: mod_base = gm
  modified_base 14: mod_base = cm
  modified_base 15: mod_base = OTHER; note = 2'-O-methyl-adenosine
  modified_base 16: mod_base = OTHER; note = 2'-O-methyl-adenosine
  modified_base 17: mod_base = OTHER; note = 2'-O-methyl-adenosine
  modified_base 18: mod_base = gm
  modified_base 19: mod_base = OTHER; note = 2'-O-methyl-adenosine
  modified_base 20: mod_base = OTHER; note = 2'-O-methyl-adenosine
  modified_base 21: mod_base = OTHER; note = 2'-O-methyl-adenosine
ctcaaggaagcagcaaagaaa

SEQ ID NO: 1042 - RNA, 21 nt, synthetic construct
  source 1..21: mol_type = other RNA
  modified_base <1: mod_base = OTHER; note = two inverted abasic nucleosides
  modified_base 1: mod_base = OTHER; note = 2'-O-methyl-adenosine
  modified_base 1^2: mod_base = OTHER; note = Phosphorothioate bond
  modified_base 2: mod_base = um
  modified_base 2^3: mod_base = OTHER; note = Phosphorothioate bond
  modified_base 3: mod_base = OTHER; note = 2'-O-methyl-adenosine
  modified_base 4: mod_base = um
  modified_base 5: mod_base = OTHER; note = 2'-O-methyl-adenosine
  modified_base 6: mod_base = um
  modified_base 7: mod_base = gm
  modified_base 8: mod_base = gm
  modified_base 9: mod_base = OTHER; note = 2'-Fluoro-adenosine
  modified_base 10: mod_base = OTHER; note = 2'-Fluoro-uridine
  modified_base 11: mod_base = OTHER; note = 2'-Fluoro-uridine
  modified_base 12: mod_base = cm
  modified_base 13: mod_base = um
  modified_base 14: mod_base = gm
  modified_base 15: mod_base = um
  modified_base 16: mod_base = OTHER; note = 2'-O-methyl-adenosine
  modified_base 17: mod_base = OTHER; note = 2'-O-methyl-adenosine
  modified_base 18: mod_base = gm
  modified_base 19: mod_base = OTHER; note = 2'-O-methyl-adenosine
  modified_base 20: mod_base = gm
  modified_base 21: mod_base = OTHER; note = 2'-O-methyl-adenosine
atatatggattctgtaagaga

SEQ ID NO: 1043 - RNA, 21 nt, synthetic construct
  source 1..21: mol_type = other RNA
  modified_base <1: mod_base = OTHER; note = two inverted abasic nucleosides
  modified_base 1: mod_base = gm
  modified_base 1^2: mod_base = OTHER; note = Phosphorothioate bond
  modified_base 2: mod_base = um
  modified_base 2^3: mod_base = OTHER; note = Phosphorothioate bond
  modified_base 3: mod_base = OTHER; note = 2'-O-methyl-adenosine
  modified_base 4: mod_base = OTHER; note = 2'-O-methyl-adenosine
  modified_base 5: mod_base = cm
  modified_base 6: mod_base = um
  modified_base 7: mod_base = OTHER; note = 2'-O-methyl-adenosine
  modified_base 8: mod_base = OTHER; note = 2'-O-methyl-adenosine
  modified_base 9: mod_base = OTHER; note = 2'-Fluoro-guanosine
  modified_base 10: mod_base = OTHER; note = 2'-Fluoro-uridine
  modified_base 11: mod_base = OTHER; note = 2'-Fluoro-guanosine
  modified_base 12: mod_base = um
  modified_base 13: mod_base = cm
  modified_base 14: mod_base = cm
  modified_base 15: mod_base = cm
  modified_base 16: mod_base = OTHER; note = 2'-O-methyl-adenosine
  modified_base 17: mod_base = OTHER; note = 2'-O-methyl-adenosine
  modified_base 18: mod_base = cm
  modified_base 19: mod_base = OTHER; note = 2'-O-methyl-adenosine
  modified_base 20: mod_base = OTHER; note = 2'-O-methyl-adenosine
  modified_base 21: mod_base = um
gtaactaagtgtcccaacaat

SEQ ID NO: 1044 - RNA, 21 nt, synthetic construct
  source 1..21: mol_type = other RNA
  modified_base <1: mod_base = OTHER; note = two inverted abasic nucleosides
  modified_base 1: mod_base = um
  modified_base 1^2: mod_base = OTHER; note = Phosphorothioate bond
  modified_base 2: mod_base = cm
  modified_base 2^3: mod_base = OTHER; note = Phosphorothioate bond
  modified_base 3: mod_base = OTHER; note = 2'-O-methyl-adenosine
  modified_base 4: mod_base = OTHER; note = 2'-O-methyl-adenosine
  modified_base 5: mod_base = gm
  modified_base 6: mod_base = cm
  modified_base 7: mod_base = um
  modified_base 8: mod_base = cm
  modified_base 9: mod_base = OTHER; note = 2'-Fluoro-uridine
  modified_base 10: mod_base = OTHER; note = 2'-Fluoro-adenosine
  modified_base 11: mod_base = OTHER; note = 2'-Fluoro-cytidine
  modified_base 12: mod_base = um
  modified_base 13: mod_base = um
  modified_base 14: mod_base = um
  modified_base 15: mod_base = OTHER; note = 2'-O-methyl-adenosine
  modified_base 16: mod_base = cm
  modified_base 17: mod_base = gm
  modified_base 18: mod_base = OTHER; note = 2'-O-methyl-adenosine
  modified_base 19: mod_base = OTHER; note = 2'-O-methyl-adenosine
  modified_base 20: mod_base = gm
  modified_base 21: mod_base = um
tcaagctctactttacgaagt

SEQ ID NO: 1045 - RNA, 21 nt, synthetic construct
  source 1..21: mol_type = other RNA
  modified_base <1: mod_base = OTHER; note = two inverted abasic nucleosides
  modified_base 1: mod_base = gm
  modified_base 1^2: mod_base = OTHER; note = Phosphorothioate bond
  modified_base 2: mod_base = OTHER; note = 2'-O-methyl-adenosine
  modified_base 2^3: mod_base = OTHER; note = Phosphorothioate bond
  modified_base 3: mod_base = gm
  modified_base 4: mod_base = gm
  modified_base 5: mod_base = OTHER; note = 2'-O-methyl-adenosine
  modified_base 6: mod_base = cm
  modified_base 7: mod_base = cm
  modified_base 8: mod_base = gm
  modified_base 9: mod_base = OTHER; note = 2'-Fluoro-adenosine
  modified_base 10: mod_base = OTHER; note = 2'-Fluoro-uridine
  modified_base 11: mod_base = OTHER; note = 2'-Fluoro-guanosine
  modified_base 12: mod_base = OTHER; note = 2'-O-methyl-adenosine
  modified_base 13: mod_base = gm
  modified_base 14: mod_base = OTHER; note = 2'-O-methyl-adenosine
  modified_base 15: mod_base = OTHER; note = 2'-O-methyl-adenosine
  modified_base 16: mod_base = um
  modified_base 17: mod_base = OTHER; note = 2'-O-methyl-adenosine
  modified_base 18: mod_base = OTHER; note = 2'-O-methyl-adenosine
  modified_base 19: mod_base = cm
  modified_base 20: mod_base = um
  modified_base 21: mod_base = OTHER; note = 2'-O-methyl-adenosine
gaggaccgatgagaataacta

SEQ ID NO: 1046 - RNA, 21 nt, synthetic construct
  source 1..21: mol_type = other RNA
  modified_base <1: mod_base = OTHER; note = two inverted abasic nucleosides
  modified_base 1: mod_base = gm
  modified_base 1^2: mod_base = OTHER; note = Phosphorothioate bond
  modified_base 2: mod_base = cm
  modified_base 2^3: mod_base = OTHER; note = Phosphorothioate bond
  modified_base 3: mod_base = um
  modified_base 4: mod_base = um
  modified_base 5: mod_base = um
  modified_base 6: mod_base = um
  modified_base 7: mod_base = OTHER; note = 2'-O-methyl-adenosine
  modified_base 8: mod_base = gm
  modified_base 9: mod_base = OTHER; note = 2'-Fluoro-cytidine
  modified_base 10: mod_base = OTHER; note = 2'-Fluoro-adenosine
  modified_base 11: mod_base = OTHER; note = 2'-Fluoro-guanosine
  modified_base 12: mod_base = cm
  modified_base 13: mod_base = um
  modified_base 14: mod_base = cm
  modified_base 15: mod_base = OTHER; note = 2'-O-methyl-adenosine
  modified_base 16: mod_base = um
  modified_base 17: mod_base = gm
  modified_base 18: mod_base = um
  modified_base 19: mod_base = cm
  modified_base 20: mod_base = um
  modified_base 21: mod_base = OTHER; note = 2'-O-methyl-adenosine
gcttttagcagctcatgtcta

SEQ ID NO: 1047 - RNA, 21 nt, synthetic construct
  source 1..21: mol_type = other RNA
  modified_base <1: mod_base = OTHER; note = two inverted abasic nucleosides
  modified_base 1: mod_base = um
  modified_base 1^2: mod_base = OTHER; note = Phosphorothioate bond
  modified_base 2: mod_base = um
  modified_base 2^3: mod_base = OTHER; note = Phosphorothioate bond
  modified_base 3: mod_base = OTHER; note = 2'-O-methyl-adenosine
  modified_base 4: mod_base = um
  modified_base 5: mod_base = cm
  modified_base 6: mod_base = OTHER; note = 2'-O-methyl-adenosine
  modified_base 7: mod_base = gm
  modified_base 8: mod_base = OTHER; note = 2'-O-methyl-adenosine
  modified_base 9: mod_base = OTHER; note = 2'-Fluoro-adenosine
  modified_base 10: mod_base = OTHER; note = 2'-Fluoro-uridine
  modified_base 11: mod_base = OTHER; note = 2'-Fluoro-guanosine
  modified_base 12: mod_base = um
  modified_base 13: mod_base = um
  modified_base 14: mod_base = gm
  modified_base 15: mod_base = OTHER; note = 2'-O-methyl-adenosine
  modified_base 16: mod_base = OTHER; note = 2'-O-methyl-adenosine
  modified_base 17: mod_base = cm
  modified_base 18: mod_base = OTHER; note = 2'-O-methyl-adenosine
  modified_base 19: mod_base = gm
  modified_base 20: mod_base = cm
  modified_base 21: mod_base = um
ttatcagaatgttgaacagct

SEQ ID NO: 1048 - RNA, 21 nt, synthetic construct
  source 1..21: mol_type = other RNA
  modified_base <1: mod_base = OTHER; note = two inverted abasic nucleosides
  modified_base 1: mod_base = um
  modified_base 1^2: mod_base = OTHER; note = Phosphorothioate bond
  modified_base 2: mod_base = gm
  modified_base 2^3: mod_base = OTHER; note = Phosphorothioate bond
  modified_base 3: mod_base = um
  modified_base 4: mod_base = OTHER; note = 2'-O-methyl-adenosine
  modified_base 5: mod_base = um
  modified_base 6: mod_base = cm
  modified_base 7: mod_base = OTHER; note = 2'-O-methyl-adenosine
  modified_base 8: mod_base = OTHER; note = 2'-O-methyl-adenosine
  modified_base 9: mod_base = OTHER; note = 2'-Fluoro-guanosine
  modified_base 10: mod_base = OTHER; note = 2'-Fluoro-cytidine
  modified_base 11: mod_base = OTHER; note = 2'-Fluoro-uridine
  modified_base 12: mod_base = cm
  modified_base 13: mod_base = um
  modified_base 14: mod_base = OTHER; note = 2'-O-methyl-adenosine
  modified_base 15: mod_base = cm
  modified_base 16: mod_base = um
  modified_base 17: mod_base = um
  modified_base 18: mod_base = um
  modified_base 19: mod_base = OTHER; note = 2'-O-methyl-adenosine
  modified_base 20: mod_base = cm
  modified_base 21: mod_base = gm
tgtatcaagctctactttacg

SEQ ID NO: 1049 - RNA, 21 nt, synthetic construct
  source 1..21: mol_type = other RNA
  modified_base <1: mod_base = OTHER; note = two inverted abasic nucleosides
  modified_base 1: mod_base = OTHER; note = 2'-O-methyl-adenosine
  modified_base 1^2: mod_base = OTHER; note = Phosphorothioate bond
  modified_base 2: mod_base = um
  modified_base 2^3: mod_base = OTHER; note = Phosphorothioate bond
  modified_base 3: mod_base = um
  modified_base 4: mod_base = cm
  modified_base 5: mod_base = cm
  modified_base 6: mod_base = OTHER; note = 2'-O-methyl-adenosine
  modified_base 7: mod_base = OTHER; note = 2'-O-methyl-adenosine
  modified_base 8: mod_base = OTHER; note = 2'-O-methyl-adenosine
  modified_base 9: mod_base = OTHER; note = 2'-Fluoro-cytidine
  modified_base 10: mod_base = OTHER; note = 2'-Fluoro-adenosine
  modified_base 11: mod_base = OTHER; note = 2'-Fluoro-adenosine
  modified_base 12: mod_base = cm
  modified_base 13: mod_base = OTHER; note = 2'-O-methyl-adenosine
  modified_base 14: mod_base = gm
  modified_base 15: mod_base = um
  modified_base 16: mod_base = OTHER; note = 2'-O-methyl-adenosine
  modified_base 17: mod_base = cm
  modified_base 18: mod_base = um
  modified_base 19: mod_base = cm
  modified_base 20: mod_base = OTHER; note = 2'-O-methyl-adenosine
  modified_base 21: mod_base = OTHER; note = 2'-O-methyl-adenosine
attccaaacaacagtactcaa

SEQ ID NO: 1050 - RNA, 21 nt, synthetic construct
  source 1..21: mol_type = other RNA
  modified_base <1: mod_base = OTHER; note = two inverted abasic nucleosides
  modified_base 1: mod_base = OTHER; note = 2'-O-methyl-adenosine
  modified_base 1^2: mod_base = OTHER; note = Phosphorothioate bond
  modified_base 2: mod_base = OTHER; note = 2'-O-methyl-adenosine
  modified_base 2^3: mod_base = OTHER; note = Phosphorothioate bond
  modified_base 3: mod_base = OTHER; note = 2'-O-methyl-adenosine
  modified_base 4: mod_base = gm
  modified_base 5: mod_base = OTHER; note = 2'-O-methyl-adenosine
  modified_base 6: mod_base = cm
  modified_base 7: mod_base = um
  modified_base 8: mod_base = OTHER; note = 2'-O-methyl-adenosine
  modified_base 9: mod_base = OTHER; note = 2'-Fluoro-uridine
  modified_base 10: mod_base = OTHER; note = 2'-Fluoro-uridine
  modified_base 11: mod_base = OTHER; note = 2'-Fluoro-adenosine
  modified_base 12: mod_base = um
  modified_base 13: mod_base = um
  modified_base 14: mod_base = cm
  modified_base 15: mod_base = cm
  modified_base 16: mod_base = cm
  modified_base 17: mod_base = um
  modified_base 18: mod_base = OTHER; note = 2'-O-methyl-adenosine
  modified_base 19: mod_base = um
  modified_base 20: mod_base = cm
  modified_base 21: mod_base = OTHER; note = 2'-O-methyl-adenosine
aaagactattattccctatca

SEQ ID NO: 1051 - RNA, 21 nt, synthetic construct
  source 1..21: mol_type = other RNA
  modified_base <1: mod_base = OTHER; note = two inverted abasic nucleosides
  modified_base 1: mod_base = um
  modified_base 1^2: mod_base = OTHER; note = Phosphorothioate bond
  modified_base 2: mod_base = gm
  modified_base 2^3: mod_base = OTHER; note = Phosphorothioate bond
  modified_base 3: mod_base = OTHER; note = 2'-O-methyl-adenosine
  modified_base 4: mod_base = OTHER; note = 2'-O-methyl-adenosine
  modified_base 5: mod_base = cm
  modified_base 6: mod_base = OTHER; note = 2'-O-methyl-adenosine
  modified_base 7: mod_base = um
  modified_base 8: mod_base = gm
  modified_base 9: mod_base = OTHER; note = 2'-Fluoro-adenosine
  modified_base 10: mod_base = OTHER; note = 2'-Fluoro-cytidine
  modified_base 11: mod_base = OTHER; note = 2'-Fluoro-adenosine
  modified_base 12: mod_base = um
  modified_base 13: mod_base = cm
  modified_base 14: mod_base = um
  modified_base 15: mod_base = um
  modified_base 16: mod_base = cm
  modified_base 17: mod_base = gm
  modified_base 18: mod_base = gm
  modified_base 19: mod_base = um
  modified_base 20: mod_base = um
  modified_base 21: mod_base = um
tgaacatgacatcttcggttt

SEQ ID NO: 1052 - RNA, 21 nt, synthetic construct
  source 1..21: mol_type = other RNA
  modified_base <1: mod_base = OTHER; note = two inverted abasic nucleosides
  modified_base 1: mod_base = um
  modified_base 1^2: mod_base = OTHER; note = Phosphorothioate bond
  modified_base 2: mod_base = gm
  modified_base 2^3: mod_base = OTHER; note = Phosphorothioate bond
  modified_base 3: mod_base = um
  modified_base 4: mod_base = um
  modified_base 5: mod_base = gm
  modified_base 6: mod_base = OTHER; note = 2'-O-methyl-adenosine
  modified_base 7: mod_base = OTHER; note = 2'-O-methyl-adenosine
  modified_base 8: mod_base = cm
  modified_base 9: mod_base = OTHER; note = 2'-Fluoro-adenosine
  modified_base 10: mod_base = OTHER; note = 2'-Fluoro-guanosine
  modified_base 11: mod_base = OTHER; note = 2'-Fluoro-cytidine
  modified_base 12: mod_base = um
  modified_base 13: mod_base = gm
  modified_base 14: mod_base = gm
  modified_base 15: mod_base = um
  modified_base 16: mod_base = gm
  modified_base 17: mod_base = OTHER; note = 2'-O-methyl-adenosine
  modified_base 18: mod_base = OTHER; note = 2'-O-methyl-adenosine
  modified_base 19: mod_base = OTHER; note = 2'-O-methyl-adenosine
  modified_base 20: mod_base = um
  modified_base 21: mod_base = um
tgttgaacagctggtgaaatt

SEQ ID NO: 1053 - RNA, 21 nt, synthetic construct
  source 1..21: mol_type = other RNA
  modified_base <1: mod_base = OTHER; note = two inverted abasic nucleosides
  modified_base 1: mod_base = OTHER; note = 2'-O-methyl-adenosine
  modified_base 1^2: mod_base = OTHER; note = Phosphorothioate bond
  modified_base 2: mod_base = um
  modified_base 2^3: mod_base = OTHER; note = Phosphorothioate bond
  modified_base 3: mod_base = gm
  modified_base 4: mod_base = OTHER; note = 2'-O-methyl-adenosine
  modified_base 5: mod_base = um
  modified_base 6: mod_base = OTHER; note = 2'-O-methyl-adenosine
  modified_base 7: mod_base = OTHER; note = 2'-O-methyl-adenosine
  modified_base 8: mod_base = OTHER; note = 2'-O-methyl-adenosine
  modified_base 9: mod_base = OTHER; note = 2'-Fluoro-guanosine
  modified_base 10: mod_base = OTHER; note = 2'-Fluoro-adenosine
  modified_base 11: mod_base = OTHER; note = 2'-Fluoro-cytidine
  modified_base 12: mod_base = um
  modified_base 13: mod_base = OTHER; note = 2'-O-methyl-adenosine
  modified_base 14: mod_base = um
  modified_base 15: mod_base = um
  modified_base 16: mod_base = OTHER; note = 2'-O-methyl-adenosine
  modified_base 17: mod_base = um
  modified_base 18: mod_base = um
  modified_base 19: mod_base = cm
  modified_base 20: mod_base = cm
  modified_base 21: mod_base = cm
atgataaagactattattccc

SEQ ID NO: 1054 - RNA, 21 nt, synthetic construct
  source 1..21: mol_type = other RNA
  modified_base <1: mod_base = OTHER; note = two inverted abasic nucleosides
  modified_base 1: mod_base = um
  modified_base 1^2: mod_base = OTHER; note = Phosphorothioate bond
  modified_base 2: mod_base = um
  modified_base 2^3: mod_base = OTHER; note = Phosphorothioate bond
  modified_base 3: mod_base = cm
  modified_base 4: mod_base = cm
  modified_base 5: mod_base = OTHER; note = 2'-O-methyl-adenosine
  modified_base 6: mod_base = gm
  modified_base 7: mod_base = OTHER; note = 2'-O-methyl-adenosine
  modified_base 8: mod_base = OTHER; note = 2'-O-methyl-adenosine
  modified_base 9: mod_base = OTHER; note = 2'-Fluoro-adenosine
  modified_base 10: mod_base = OTHER; note = 2'-Fluoro-adenosine
  modified_base 11: mod_base = OTHER; note = 2'-Fluoro-uridine
  modified_base 12: mod_base = gm
  modified_base 13: mod_base = um
  modified_base 14: mod_base = OTHER; note = 2'-O-methyl-adenosine
  modified_base 15: mod_base = um
  modified_base 16: mod_base = cm
  modified_base 17: mod_base = OTHER; note = 2'-O-methyl-adenosine
  modified_base 18: mod_base = OTHER; note = 2'-O-methyl-adenosine
  modified_base 19: mod_base = gm
  modified_base 20: mod_base = cm
  modified_base 21: mod_base = um
ttccagaaaatgtatcaagct

SEQ ID NO: 1055 - RNA, 21 nt, synthetic construct
  source 1..21: mol_type = other RNA
  modified_base <1: mod_base = OTHER; note = two inverted abasic nucleosides
  modified_base 1: mod_base = OTHER; note = 2'-O-methyl-adenosine
  modified_base 1^2: mod_base = OTHER; note = Phosphorothioate bond
  modified_base 2: mod_base = OTHER; note = 2'-O-methyl-adenosine
  modified_base 2^3: mod_base = OTHER; note = Phosphorothioate bond
  modified_base 3: mod_base = um
  modified_base 4: mod_base = gm
  modified_base 5: mod_base = OTHER; note = 2'-O-methyl-adenosine
  modified_base 6: mod_base = gm
  modified_base 7: mod_base = gm
  modified_base 8: mod_base = OTHER; note = 2'-O-methyl-adenosine
  modified_base 9: mod_base = OTHER; note = 2'-Fluoro-cytidine
  modified_base 10: mod_base = OTHER; note = 2'-Fluoro-adenosine
  modified_base 11: mod_base = OTHER; note = 2'-Fluoro-adenosine
  modified_base 12: mod_base = OTHER; note = 2'-O-methyl-adenosine
  modified_base 13: mod_base = um
  modified_base 14: mod_base = um
  modified_base 15: mod_base = OTHER; note = 2'-O-methyl-adenosine
  modified_base 16: mod_base = cm
  modified_base 17: mod_base = OTHER; note = 2'-O-methyl-adenosine
  modified_base 18: mod_base = um
  modified_base 19: mod_base = cm
  modified_base 20: mod_base = OTHER; note = 2'-O-methyl-adenosine
  modified_base 21: mod_base = OTHER; note = 2'-O-methyl-adenosine
aatgaggacaaattacatcaa

SEQ ID NO: 1056 - RNA, 21 nt, synthetic construct
  source 1..21: mol_type = other RNA
  modified_base <1: mod_base = OTHER; note = two inverted abasic nucleosides
  modified_base 1: mod_base = gm
  modified_base 1^2: mod_base = OTHER; note = Phosphorothioate bond
  modified_base 2: mod_base = um
  modified_base 2^3: mod_base = OTHER; note = Phosphorothioate bond
  modified_base 3: mod_base = cm
  modified_base 4: mod_base = um
  modified_base 5: mod_base = OTHER; note = 2'-O-methyl-adenosine
  modified_base 6: mod_base = gm
  modified_base 7: mod_base = gm
  modified_base 8: mod_base = OTHER; note = 2'-O-methyl-adenosine
  modified_base 9: mod_base = OTHER; note = 2'-Fluoro-guanosine
  modified_base 10: mod_base = OTHER; note = 2'-Fluoro-guanosine
  modified_base 11: mod_base = OTHER; note = 2'-Fluoro-adenosine
  modified_base 12: mod_base = OTHER; note = 2'-O-methyl-adenosine
  modified_base 13: mod_base = OTHER; note = 2'-O-methyl-adenosine
  modified_base 14: mod_base = um
  modified_base 15: mod_base = OTHER; note = 2'-O-methyl-adenosine
  modified_base 16: mod_base = gm
  modified_base 17: mod_base = cm
  modified_base 18: mod_base = OTHER; note = 2'-O-methyl-adenosine
  modified_base 19: mod_base = OTHER; note = 2'-O-methyl-adenosine
  modified_base 20: mod_base = OTHER; note = 2'-O-methyl-adenosine
  modified_base 21: mod_base = OTHER; note = 2'-O-methyl-adenosine
gtctaggaggaaatagcaaaa

SEQ ID NO: 1057 - RNA, 21 nt, synthetic construct
  source 1..21: mol_type = other RNA
  modified_base <1: mod_base = OTHER; note = two inverted abasic nucleosides
  modified_base 1: mod_base = um
  modified_base 1^2: mod_base = OTHER; note = Phosphorothioate bond
  modified_base 2: mod_base = OTHER; note = 2'-O-methyl-adenosine
  modified_base 2^3: mod_base = OTHER; note = Phosphorothioate bond
  modified_base 3: mod_base = um
  modified_base 4: mod_base = um
  modified_base 5: mod_base = cm
  modified_base 6: mod_base = cm
  modified_base 7: mod_base = OTHER; note = 2'-O-methyl-adenosine
  modified_base 8: mod_base = OTHER; note = 2'-O-methyl-adenosine
  modified_base 9: mod_base = OTHER; note = 2'-Fluoro-adenosine
  modified_base 10: mod_base = OTHER; note = 2'-Fluoro-cytidine
  modified_base 11: mod_base = OTHER; note = 2'-Fluoro-adenosine
  modified_base 12: mod_base = OTHER; note = 2'-O-methyl-adenosine
  modified_base 13: mod_base = cm
  modified_base 14: mod_base = OTHER; note = 2'-O-methyl-adenosine
  modified_base 15: mod_base = gm
  modified_base 16: mod_base = um
  modified_base 17: mod_base = OTHER; note = 2'-O-methyl-adenosine
  modified_base 18: mod_base = cm
  modified_base 19: mod_base = um
  modified_base 20: mod_base = cm
  modified_base 21: mod_base = OTHER; note = 2'-O-methyl-adenosine
tattccaaacaacagtactca

SEQ ID NO: 1058 - RNA, 21 nt, synthetic construct
  source 1..21: mol_type = other RNA
  modified_base <1: mod_base = OTHER; note = two inverted abasic nucleosides
  modified_base 1: mod_base = um
  modified_base 1^2: mod_base = OTHER; note = Phosphorothioate bond
  modified_base 2: mod_base = um
  modified_base 2^3: mod_base = OTHER; note = Phosphorothioate bond
  modified_base 3: mod_base = cm
  modified_base 4: mod_base = um
  modified_base 5: mod_base = gm
  modified_base 6: mod_base = um
  modified_base 7: mod_base = OTHER; note = 2'-O-methyl-adenosine
  modified_base 8: mod_base = OTHER; note = 2'-O-methyl-adenosine
  modified_base 9: mod_base = OTHER; note = 2'-Fluoro-guanosine
  modified_base 10: mod_base = OTHER; note = 2'-Fluoro-adenosine
  modified_base 11: mod_base = OTHER; note = 2'-Fluoro-guanosine
  modified_base 12: mod_base = OTHER; note = 2'-O-methyl-adenosine
  modified_base 13: mod_base = um
  modified_base 14: mod_base = gm
  modified_base 15: mod_base = cm
  modified_base 16: mod_base = um
  modified_base 17: mod_base = gm
  modified_base 18: mod_base = OTHER; note = 2'-O-methyl-adenosine
  modified_base 19: mod_base = cm
  modified_base 20: mod_base = um
  modified_base 21: mod_base = OTHER; note = 2'-O-methyl-adenosine
ttctgtaagagatgctgacta

SEQ ID NO: 1059 - RNA, 21 nt, synthetic construct
  source 1..21: mol_type = other RNA
  modified_base <1: mod_base = OTHER; note = two inverted abasic nucleosides
  modified_base 1: mod_base = gm
  modified_base 1^2: mod_base = OTHER; note = Phosphorothioate bond
  modified_base 2: mod_base = cm
  modified_base 2^3: mod_base = OTHER; note = Phosphorothioate bond
  modified_base 3: mod_base = OTHER; note = 2'-O-methyl-adenosine
  modified_base 4: mod_base = gm
  modified_base 5: mod_base = cm
  modified_base 6: mod_base = um
  modified_base 7: mod_base = cm
  modified_base 8: mod_base = OTHER; note = 2'-O-methyl-adenosine
  modified_base 9: mod_base = OTHER; note = 2'-Fluoro-cytidine
  modified_base 10: mod_base = OTHER; note = 2'-Fluoro-cytidine
  modified_base 11: mod_base = OTHER; note = 2'-Fluoro-uridine
  modified_base 12: mod_base = um
  modified_base 13: mod_base = um
  modified_base 14: mod_base = gm
  modified_base 15: mod_base = OTHER; note = 2'-O-methyl-adenosine
  modified_base 16: mod_base = OTHER; note = 2'-O-methyl-adenosine
  modified_base 17: mod_base = gm
  modified_base 18: mod_base = OTHER; note = 2'-O-methyl-adenosine
  modified_base 19: mod_base = OTHER; note = 2'-O-methyl-adenosine
  modified_base 20: mod_base = um
  modified_base 21: mod_base = OTHER; note = 2'-O-methyl-adenosine
gcagctcacctttgaagaata

SEQ ID NO: 1060 - RNA, 21 nt, synthetic construct
  source 1..21: mol_type = other RNA
  modified_base <1: mod_base = OTHER; note = two inverted abasic nucleosides
  modified_base 1: mod_base = OTHER; note = 2'-O-methyl-adenosine
  modified_base 1^2: mod_base = OTHER; note = Phosphorothioate bond
  modified_base 2: mod_base = gm
  modified_base 2^3: mod_base = OTHER; note = Phosphorothioate bond
  modified_base 3: mod_base = OTHER; note = 2'-O-methyl-adenosine
  modified_base 4: mod_base = um
  modified_base 5: mod_base = cm
  modified_base 6: mod_base = OTHER; note = 2'-O-methyl-adenosine
  modified_base 7: mod_base = um
  modified_base 8: mod_base = um
  modified_base 9: mod_base = OTHER; note = 2'-Fluoro-uridine
  modified_base 10: mod_base = OTHER; note = 2'-Fluoro-adenosine
  modified_base 11: mod_base = OTHER; note = 2'-Fluoro-uridine
  modified_base 12: mod_base = gm
  modified_base 13: mod_base = um
  modified_base 14: mod_base = cm
  modified_base 15: mod_base = um
  modified_base 16: mod_base = gm
  modified_base 17: mod_base = OTHER; note = 2'-O-methyl-adenosine
  modified_base 18: mod_base = cm
  modified_base 19: mod_base = um
  modified_base 20: mod_base = cm
  modified_base 21: mod_base = um
agatcatttatgtctgactct

SEQ ID NO: 1061 - RNA, 21 nt, synthetic construct
  source 1..21: mol_type = other RNA
  modified_base <1: mod_base = OTHER; note = two inverted abasic nucleosides
  modified_base 1: mod_base = cm
  modified_base 1^2: mod_base = OTHER; note = Phosphorothioate bond
  modified_base 2: mod_base = um
  modified_base 2^3: mod_base = OTHER; note = Phosphorothioate bond
  modified_base 3: mod_base = gm
  modified_base 4: mod_base = OTHER; note = 2'-O-methyl-adenosine
  modified_base 5: mod_base = OTHER; note = 2'-O-methyl-adenosine
  modified_base 6: mod_base = cm
  modified_base 7: mod_base = OTHER; note = 2'-O-methyl-adenosine
  modified_base 8: mod_base = um
  modified_base 9: mod_base = OTHER; note = 2'-Fluoro-guanosine
  modified_base 10: mod_base = OTHER; note = 2'-Fluoro-adenosine
  modified_base 11: mod_base = OTHER; note = 2'-Fluoro-cytidine
  modified_base 12: mod_base = OTHER; note = 2'-O-methyl-adenosine
  modified_base 13: mod_base = um
  modified_base 14: mod_base = cm
  modified_base 15: mod_base = um
  modified_base 16: mod_base = um
  modified_base 17: mod_base = cm
  modified_base 18: mod_base = gm
  modified_base 19: mod_base = gm
  modified_base 20: mod_base = um
  modified_base 21: mod_base = um
ctgaacatgacatcttcggtt

SEQ ID NO: 1062 - RNA, 21 nt, synthetic construct
  source 1..21: mol_type = other RNA
  modified_base <1: mod_base = OTHER; note = two inverted abasic nucleosides
  modified_base 1: mod_base = cm
  modified_base 1^2: mod_base = OTHER; note = Phosphorothioate bond
  modified_base 2: mod_base = um
  modified_base 2^3: mod_base = OTHER; note = Phosphorothioate bond
  modified_base 3: mod_base = cm
  modified_base 4: mod_base = OTHER; note = 2'-O-methyl-adenosine
  modified_base 5: mod_base = OTHER; note = 2'-O-methyl-adenosine
  modified_base 6: mod_base = gm
  modified_base 7: mod_base = um
  modified_base 8: mod_base = cm
  modified_base 9: mod_base = OTHER; note = 2'-Fluoro-cytidine
  modified_base 10: mod_base = OTHER; note = 2'-Fluoro-guanosine
  modified_base 11: mod_base = OTHER; note = 2'-Fluoro-uridine
  modified_base 12: mod_base = um
  modified_base 13: mod_base = OTHER; note = 2'-O-methyl-adenosine
  modified_base 14: mod_base = OTHER; note = 2'-O-methyl-adenosine
  modified_base 15: mod_base = gm
  modified_base 16: mod_base = um
  modified_base 17: mod_base = OTHER; note = 2'-O-methyl-adenosine
  modified_base 18: mod_base = gm
  modified_base 19: mod_base = cm
  modified_base 20: mod_base = OTHER; note = 2'-O-methyl-adenosine
  modified_base 21: mod_base = um
ctcaagtccgttaagtagcat

SEQ ID NO: 1063 - RNA, 21 nt, synthetic construct
  source 1..21: mol_type = other RNA
  modified_base <1: mod_base = OTHER; note = two inverted abasic nucleosides
  modified_base 1: mod_base = OTHER; note = 2'-O-methyl-adenosine
  modified_base 1^2: mod_base = OTHER; note = Phosphorothioate bond
  modified_base 2: mod_base = gm
  modified_base 2^3: mod_base = OTHER; note = Phosphorothioate bond
  modified_base 3: mod_base = um
  modified_base 4: mod_base = OTHER; note = 2'-O-methyl-adenosine
  modified_base 5: mod_base = cm
  modified_base 6: mod_base = um
  modified_base 7: mod_base = gm
  modified_base 8: mod_base = um
  modified_base 9: mod_base = OTHER; note = 2'-Fluoro-guanosine
  modified_base 10: mod_base = OTHER; note = 2'-Fluoro-guanosine
  modified_base 11: mod_base = OTHER; note = 2'-Fluoro-guanosine
  modified_base 12: mod_base = OTHER; note = 2'-O-methyl-adenosine
  modified_base 13: mod_base = um
  modified_base 14: mod_base = cm
  modified_base 15: mod_base = um
  modified_base 16: mod_base = OTHER; note = 2'-O-methyl-adenosine
  modified_base 17: mod_base = um
  modified_base 18: mod_base = cm
  modified_base 19: mod_base = um
  modified_base 20: mod_base = gm
  modified_base 21: mod_base = um
agtactgtgggatctatctgt

SEQ ID NO: 1064 - RNA, 21 nt, synthetic construct
  source 1..21: mol_type = other RNA
  modified_base <1: mod_base = OTHER; note = two inverted abasic nucleosides
  modified_base 1: mod_base = OTHER; note = 2'-O-methyl-adenosine
  modified_base 1^2: mod_base = OTHER; note = Phosphorothioate bond
  modified_base 2: mod_base = OTHER; note = 2'-O-methyl-adenosine
  modified_base 2^3: mod_base = OTHER; note = Phosphorothioate bond
  modified_base 3: mod_base = gm
  modified_base 4: mod_base = cm
  modified_base 5: mod_base = um
  modified_base 6: mod_base = cm
  modified_base 7: mod_base = um
  modified_base 8: mod_base = OTHER; note = 2'-O-methyl-adenosine
  modified_base 9: mod_base = OTHER; note = 2'-Fluoro-cytidine
  modified_base 10: mod_base = OTHER; note = 2'-Fluoro-uridine
  modified_base 11: mod_base = OTHER; note = 2'-Fluoro-uridine
  modified_base 12: mod_base = um
  modified_base 13: mod_base = OTHER; note = 2'-O-methyl-adenosine
  modified_base 14: mod_base = cm
  modified_base 15: mod_base = gm
  modified_base 16: mod_base = OTHER; note = 2'-O-methyl-adenosine
  modified_base 17: mod_base = OTHER; note = 2'-O-methyl-adenosine
  modified_base 18: mod_base = gm
  modified_base 19: mod_base = um
  modified_base 20: mod_base = gm
  modified_base 21: mod_base = um
aagctctactttacgaagtgt

SEQ ID NO: 1065 - RNA, 21 nt, synthetic construct
  source 1..21: mol_type = other RNA
  modified_base <1: mod_base = OTHER; note = two inverted abasic nucleosides
  modified_base 1: mod_base = OTHER; note = 2'-O-methyl-adenosine
  modified_base 1^2: mod_base = OTHER; note = Phosphorothioate bond
  modified_base 2: mod_base = OTHER; note = 2'-O-methyl-adenosine
  modified_base 2^3: mod_base = OTHER; note = Phosphorothioate bond
  modified_base 3: mod_base = OTHER; note = 2'-O-methyl-adenosine
  modified_base 4: mod_base = OTHER; note = 2'-O-methyl-adenosine
  modified_base 5: mod_base = cm
  modified_base 6: mod_base = um
  modified_base 7: mod_base = gm
  modified_base 8: mod_base = OTHER; note = 2'-O-methyl-adenosine
  modified_base 9: mod_base = OTHER; note = 2'-Fluoro-guanosine
  modified_base 10: mod_base = OTHER; note = 2'-Fluoro-cytidine
  modified_base 11: mod_base = OTHER; note = 2'-Fluoro-uridine
  modified_base 12: mod_base = gm
  modified_base 13: mod_base = gm
  modified_base 14: mod_base = OTHER; note = 2'-O-methyl-adenosine
  modified_base 15: mod_base = OTHER; note = 2'-O-methyl-adenosine
  modified_base 16: mod_base = um
  modified_base 17: mod_base = cm
  modified_base 18: mod_base = um
  modified_base 19: mod_base = OTHER; note = 2'-O-methyl-adenosine
  modified_base 20: mod_base = OTHER; note = 2'-O-methyl-adenosine
  modified_base 21: mod_base = gm
aaaactgagctggaatctaag

SEQ ID NO: 1066 - RNA, 21 nt, synthetic construct
  source 1..21: mol_type = other RNA
  modified_base <1: mod_base = OTHER; note = two inverted abasic nucleosides
  modified_base 1: mod_base = OTHER; note = 2'-O-methyl-adenosine
  modified_base 1^2: mod_base = OTHER; note = Phosphorothioate bond
  modified_base 2: mod_base = gm
  modified_base 2^3: mod_base = OTHER; note = Phosphorothioate bond
  modified_base 3: mod_base = um
  modified_base 4: mod_base = OTHER; note = 2'-O-methyl-adenosine
  modified_base 5: mod_base = cm
  modified_base 6: mod_base = cm
  modified_base 7: mod_base = OTHER; note = 2'-O-methyl-adenosine
  modified_base 8: mod_base = OTHER; note = 2'-O-methyl-adenosine
  modified_base 9: mod_base = OTHER; note = 2'-Fluoro-uridine
  modified_base 10: mod_base = OTHER; note = 2'-Fluoro-adenosine
  modified_base 11: mod_base = OTHER; note = 2'-Fluoro-adenosine
  modified_base 12: mod_base = OTHER; note = 2'-O-methyl-adenosine
  modified_base 13: mod_base = gm
  modified_base 14: mod_base = cm
  modified_base 15: mod_base = OTHER; note = 2'-O-methyl-adenosine
  modified_base 16: mod_base = OTHER; note = 2'-O-methyl-adenosine
  modified_base 17: mod_base = gm
  modified_base 18: mod_base = OTHER; note = 2'-O-methyl-adenosine
  modified_base 19: mod_base = OTHER; note = 2'-O-methyl-adenosine
  modified_base 20: mod_base = um
  modified_base 21: mod_base = cm
agtaccaataaagcaagaatc

SEQ ID NO: 1067 - RNA, 21 nt, synthetic construct
  source 1..21: mol_type = other RNA
  modified_base <1: mod_base = OTHER; note = two inverted abasic nucleosides
  modified_base 1: mod_base = cm
  modified_base 1^2: mod_base = OTHER; note = Phosphorothioate bond
  modified_base 2: mod_base = um
  modified_base 2^3: mod_base = OTHER; note = Phosphorothioate bond
  modified_base 3: mod_base = um
  modified_base 4: mod_base = OTHER; note = 2'-O-methyl-adenosine
  modified_base 5: mod_base = gm
  modified_base 6: mod_base = OTHER; note = 2'-O-methyl-adenosine
  modified_base 7: mod_base = OTHER; note = 2'-O-methyl-adenosine
  modified_base 8: mod_base = um
  modified_base 9: mod_base = OTHER; note = 2'-Fluoro-adenosine
  modified_base 10: mod_base = OTHER; note = 2'-Fluoro-cytidine
  modified_base 11: mod_base = OTHER; note = 2'-Fluoro-adenosine
  modified_base 12: mod_base = um
  modified_base 13: mod_base = um
  modified_base 14: mod_base = cm
  modified_base 15: mod_base = cm
  modified_base 16: mod_base = OTHER; note = 2'-O-methyl-adenosine
  modified_base 17: mod_base = gm
  modified_base 18: mod_base = OTHER; note = 2'-O-methyl-adenosine
  modified_base 19: mod_base = OTHER; note = 2'-O-methyl-adenosine
  modified_base 20: mod_base = OTHER; note = 2'-O-methyl-adenosine
  modified_base 21: mod_base = OTHER; note = 2'-O-methyl-adenosine
cttagaatacattccagaaaa

SEQ ID NO: 1068 - RNA, 21 nt, synthetic construct
  source 1..21: mol_type = other RNA
  modified_base <1: mod_base = OTHER; note = two inverted abasic nucleosides
  modified_base 1: mod_base = OTHER; note = 2'-O-methyl-adenosine
  modified_base 1^2: mod_base = OTHER; note = Phosphorothioate bond
  modified_base 2: mod_base = OTHER; note = 2'-O-methyl-adenosine
  modified_base 2^3: mod_base = OTHER; note = Phosphorothioate bond
  modified_base 3: mod_base = OTHER; note = 2'-O-methyl-adenosine
  modified_base 4: mod_base = um
  modified_base 5: mod_base = gm
  modified_base 6: mod_base = OTHER; note = 2'-O-methyl-adenosine
  modified_base 7: mod_base = um
  modified_base 8: mod_base = um
  modified_base 9: mod_base = OTHER; note = 2'-Fluoro-guanosine
  modified_base 10: mod_base = OTHER; note = 2'-Fluoro-cytidine
  modified_base 11: mod_base = OTHER; note = 2'-Fluoro-adenosine
  modified_base 12: mod_base = um
  modified_base 13: mod_base = cm
  modified_base 14: mod_base = OTHER; note = 2'-O-methyl-adenosine
  modified_base 15: mod_base = um
  modified_base 16: mod_base = um
  modified_base 17: mod_base = gm
  modified_base 18: mod_base = OTHER; note = 2'-O-methyl-adenosine
  modified_base 19: mod_base = um
  modified_base 20: mod_base = OTHER; note = 2'-O-methyl-adenosine
  modified_base 21: mod_base = OTHER; note = 2'-O-methyl-adenosine
aaatgattgcatcattgataa

SEQ ID NO: 1069 - RNA, 21 nt, synthetic construct
  source 1..21: mol_type = other RNA
  modified_base <1: mod_base = OTHER; note = two inverted abasic nucleosides
  modified_base 1: mod_base = cm
  modified_base 1^2: mod_base = OTHER; note = Phosphorothioate bond
  modified_base 2: mod_base = um
  modified_base 2^3: mod_base = OTHER; note = Phosphorothioate bond
  modified_base 3: mod_base = gm
  modified_base 4: mod_base = gm
  modified_base 5: mod_base = um
  modified_base 6: mod_base = gm
  modified_base 7: mod_base = OTHER; note = 2'-O-methyl-adenosine
  modified_base 8: mod_base = OTHER; note = 2'-O-methyl-adenosine
  modified_base 9: mod_base = OTHER; note = 2'-Fluoro-adenosine
  modified_base 10: mod_base = OTHER; note = 2'-Fluoro-uridine
  modified_base 11: mod_base = OTHER; note = 2'-Fluoro-uridine
  modified_base 12: mod_base = um
  modified_base 13: mod_base = um
  modified_base 14: mod_base = OTHER; note = 2'-O-methyl-adenosine
  modified_base 15: mod_base = cm
  modified_base 16: mod_base = OTHER; note = 2'-O-methyl-adenosine
  modified_base 17: mod_base = OTHER; note = 2'-O-methyl-adenosine
  modified_base 18: mod_base = OTHER; note = 2'-O-methyl-adenosine
  modified_base 19: mod_base = gm
  modified_base 20: mod_base = gm
  modified_base 21: mod_base = OTHER; note = 2'-O-methyl-adenosine
ctggtgaaattttacaaagga

SEQ ID NO: 1070 - RNA, 21 nt, synthetic construct
  source 1..21: mol_type = other RNA
  modified_base <1: mod_base = OTHER; note = two inverted abasic nucleosides
  modified_base 1: mod_base = OTHER; note = 2'-O-methyl-adenosine
  modified_base 1^2: mod_base = OTHER; note = Phosphorothioate bond
  modified_base 2: mod_base = um
  modified_base 2^3: mod_base = OTHER; note = Phosphorothioate bond
  modified_base 3: mod_base = gm
  modified_base 4: mod_base = OTHER; note = 2'-O-methyl-adenosine
  modified_base 5: mod_base = gm
  modified_base 6: mod_base = gm
  modified_base 7: mod_base = OTHER; note = 2'-O-methyl-adenosine
  modified_base 8: mod_base = cm
  modified_base 9: mod_base = OTHER; note = 2'-Fluoro-adenosine
  modified_base 10: mod_base = OTHER; note = 2'-Fluoro-adenosine
  modified_base 11: mod_base = OTHER; note = 2'-Fluoro-adenosine
  modified_base 12: mod_base = um
  modified_base 13: mod_base = um
  modified_base 14: mod_base = OTHER; note = 2'-O-methyl-adenosine
  modified_base 15: mod_base = cm
  modified_base 16: mod_base = OTHER; note = 2'-O-methyl-adenosine
  modified_base 17: mod_base = um
  modified_base 18: mod_base = cm
  modified_base 19: mod_base = OTHER; note = 2'-O-methyl-adenosine
  modified_base 20: mod_base = OTHER; note = 2'-O-methyl-adenosine
  modified_base 21: mod_base = OTHER; note = 2'-O-methyl-adenosine
atgaggacaaattacatcaaa

SEQ ID NO: 1071 - RNA, 21 nt, synthetic construct
  source 1..21: mol_type = other RNA
  modified_base <1: mod_base = OTHER; note = two inverted abasic nucleosides
  modified_base 1: mod_base = um
  modified_base 1^2: mod_base = OTHER; note = Phosphorothioate bond
  modified_base 2: mod_base = cm
  modified_base 2^3: mod_base = OTHER; note = Phosphorothioate bond
  modified_base 3: mod_base = cm
  modified_base 4: mod_base = gm
  modified_base 5: mod_base = gm
  modified_base 6: mod_base = um
  modified_base 7: mod_base = gm
  modified_base 8: mod_base = cm
  modified_base 9: mod_base = OTHER; note = 2'-Fluoro-uridine
  modified_base 10: mod_base = OTHER; note = 2'-Fluoro-adenosine
  modified_base 11: mod_base = OTHER; note = 2'-Fluoro-uridine
  modified_base 12: mod_base = um
  modified_base 13: mod_base = cm
  modified_base 14: mod_base = cm
  modified_base 15: mod_base = OTHER; note = 2'-O-methyl-adenosine
  modified_base 16: mod_base = OTHER; note = 2'-O-methyl-adenosine
  modified_base 17: mod_base = OTHER; note = 2'-O-methyl-adenosine
  modified_base 18: mod_base = cm
  modified_base 19: mod_base = OTHER; note = 2'-O-methyl-adenosine
  modified_base 20: mod_base = OTHER; note = 2'-O-methyl-adenosine
  modified_base 21: mod_base = cm
tccggtgctattccaaacaac

SEQ ID NO: 1072 - RNA, 21 nt, synthetic construct
  source 1..21: mol_type = other RNA
  modified_base <1: mod_base = OTHER; note = two inverted abasic nucleosides
  modified_base 1: mod_base = OTHER; note = 2'-O-methyl-adenosine
  modified_base 1^2: mod_base = OTHER; note = Phosphorothioate bond
  modified_base 2: mod_base = cm
  modified_base 2^3: mod_base = OTHER; note = Phosphorothioate bond
  modified_base 3: mod_base = um
  modified_base 4: mod_base = cm
  modified_base 5: mod_base = OTHER; note = 2'-O-methyl-adenosine
  modified_base 6: mod_base = OTHER; note = 2'-O-methyl-adenosine
  modified_base 7: mod_base = gm
  modified_base 8: mod_base = gm
  modified_base 9: mod_base = OTHER; note = 2'-Fluoro-uridine
  modified_base 10: mod_base = OTHER; note = 2'-Fluoro-guanosine
  modified_base 11: mod_base = OTHER; note = 2'-Fluoro-cytidine
  modified_base 12: mod_base = um
  modified_base 13: mod_base = cm
  modified_base 14: mod_base = um
  modified_base 15: mod_base = gm
  modified_base 16: mod_base = um
  modified_base 17: mod_base = um
  modified_base 18: mod_base = um
  modified_base 19: mod_base = cm
  modified_base 20: mod_base = cm
  modified_base 21: mod_base = OTHER; note = 2'-O-methyl-adenosine
actcaaggtgctctgtttcca

SEQ ID NO: 1073 - RNA, 21 nt, synthetic construct
  source 1..21: mol_type = other RNA
  modified_base <1: mod_base = OTHER; note = two inverted abasic nucleosides
  modified_base 1: mod_base = gm
  modified_base 1^2: mod_base = OTHER; note = Phosphorothioate bond
  modified_base 2: mod_base = OTHER; note = 2'-O-methyl-adenosine
  modified_base 2^3: mod_base = OTHER; note = Phosphorothioate bond
  modified_base 3: mod_base = OTHER; note = 2'-O-methyl-adenosine
  modified_base 4: mod_base = gm
  modified_base 5: mod_base = OTHER; note = 2'-O-methyl-adenosine
  modified_base 6: mod_base = OTHER; note = 2'-O-methyl-adenosine
  modified_base 7: mod_base = OTHER; note = 2'-O-methyl-adenosine
  modified_base 8: mod_base = um
  modified_base 9: mod_base = OTHER; note = 2'-Fluoro-guanosine
  modified_base 10: mod_base = OTHER; note = 2'-Fluoro-adenosine
  modified_base 11: mod_base = OTHER; note = 2'-Fluoro-uridine
  modified_base 12: mod_base = um
  modified_base 13: mod_base = gm
  modified_base 14: mod_base = cm
  modified_base 15: mod_base = OTHER; note = 2'-O-methyl-adenosine
  modified_base 16: mod_base = um
  modified_base 17: mod_base = cm
  modified_base 18: mod_base = OTHER; note = 2'-O-methyl-adenosine
  modified_base 19: mod_base = um
  modified_base 20: mod_base = um
  modified_base 21: mod_base = gm
gaagaaatgattgcatcattg

SEQ ID NO: 1074 - RNA, 21 nt, synthetic construct
  source 1..21: mol_type = other RNA
  modified_base <1: mod_base = OTHER; note = two inverted abasic nucleosides
  modified_base 1: mod_base = OTHER; note = 2'-O-methyl-adenosine
  modified_base 1^2: mod_base = OTHER; note = Phosphorothioate bond
  modified_base 2: mod_base = gm
  modified_base 2^3: mod_base = OTHER; note = Phosphorothioate bond
  modified_base 3: mod_base = cm
  modified_base 4: mod_base = OTHER; note = 2'-O-methyl-adenosine
  modified_base 5: mod_base = OTHER; note = 2'-O-methyl-adenosine
  modified_base 6: mod_base = gm
  modified_base 7: mod_base = OTHER; note = 2'-O-methyl-adenosine
  modified_base 8: mod_base = OTHER; note = 2'-O-methyl-adenosine
  modified_base 9: mod_base = OTHER; note = 2'-Fluoro-uridine
  modified_base 10: mod_base = OTHER; note = 2'-Fluoro-cytidine
  modified_base 11: mod_base = OTHER; note = 2'-Fluoro-adenosine
  modified_base 12: mod_base = OTHER; note = 2'-O-methyl-adenosine
  modified_base 13: mod_base = cm
  modified_base 14: mod_base = cm
  modified_base 15: mod_base = OTHER; note = 2'-O-methyl-adenosine
  modified_base 16: mod_base = OTHER; note = 2'-O-methyl-adenosine
  modified_base 17: mod_base = gm
  modified_base 18: mod_base = cm
  modified_base 19: mod_base = OTHER; note = 2'-O-methyl-adenosine
  modified_base 20: mod_base = um
  modified_base 21: mod_base = um
agcaagaatcaaccaagcatt

SEQ ID NO: 1075 - RNA, 21 nt, synthetic construct
  source 1..21: mol_type = other RNA
  modified_base <1: mod_base = OTHER; note = two inverted abasic nucleosides
  modified_base 1: mod_base = OTHER; note = 2'-O-methyl-adenosine
  modified_base 1^2: mod_base = OTHER; note = Phosphorothioate bond
  modified_base 2: mod_base = gm
  modified_base 2^3: mod_base = OTHER; note = Phosphorothioate bond
  modified_base 3: mod_base = cm
  modified_base 4: mod_base = um
  modified_base 5: mod_base = gm
  modified_base 6: mod_base = gm
  modified_base 7: mod_base = OTHER; note = 2'-O-methyl-adenosine
  modified_base 8: mod_base = OTHER; note = 2'-O-methyl-adenosine
  modified_base 9: mod_base = OTHER; note = 2'-Fluoro-uridine
  modified_base 10: mod_base = OTHER; note = 2'-Fluoro-cytidine
  modified_base 11: mod_base = OTHER; note = 2'-Fluoro-uridine
  modified_base 12: mod_base = OTHER; note = 2'-O-methyl-adenosine
  modified_base 13: mod_base = OTHER; note = 2'-O-methyl-adenosine
  modified_base 14: mod_base = gm
  modified_base 15: mod_base = gm
  modified_base 16: mod_base = OTHER; note = 2'-O-methyl-adenosine
  modified_base 17: mod_base = OTHER; note = 2'-O-methyl-adenosine
  modified_base 18: mod_base = cm
  modified_base 19: mod_base = um
  modified_base 20: mod_base = um
  modified_base 21: mod_base = um
agctggaatctaaggaacttt

SEQ ID NO: 1076 - RNA, 21 nt, synthetic construct
  source 1..21: mol_type = other RNA
  modified_base <1: mod_base = OTHER; note = two inverted abasic nucleosides
  modified_base 1: mod_base = OTHER; note = 2'-O-methyl-adenosine
  modified_base 1^2: mod_base = OTHER; note = Phosphorothioate bond
  modified_base 2: mod_base = gm
  modified_base 2^3: mod_base = OTHER; note = Phosphorothioate bond
  modified_base 3: mod_base = cm
  modified_base 4: mod_base = um
  modified_base 5: mod_base = um
  modified_base 6: mod_base = OTHER; note = 2'-O-methyl-adenosine
  modified_base 7: mod_base = OTHER; note = 2'-O-methyl-adenosine
  modified_base 8: mod_base = um
  modified_base 9: mod_base = OTHER; note = 2'-Fluoro-adenosine
  modified_base 10: mod_base = OTHER; note = 2'-Fluoro-uridine
  modified_base 11: mod_base = OTHER; note = 2'-Fluoro-uridine
  modified_base 12: mod_base = gm
  modified_base 13: mod_base = um
  modified_base 14: mod_base = cm
  modified_base 15: mod_base = cm
  modified_base 16: mod_base = OTHER; note = 2'-O-methyl-adenosine
  modified_base 17: mod_base = gm
  modified_base 18: mod_base = um
  modified_base 19: mod_base = OTHER; note = 2'-O-methyl-adenosine
  modified_base 20: mod_base = cm
  modified_base 21: mod_base = OTHER; note = 2'-O-methyl-adenosine
agcttaatattgtccagtaca

SEQ ID NO: 1077 - RNA, 21 nt, synthetic construct
  source 1..21: mol_type = other RNA
  modified_base <1: mod_base = OTHER; note = two inverted abasic nucleosides
  modified_base 1: mod_base = OTHER; note = 2'-O-methyl-adenosine
  modified_base 1^2: mod_base = OTHER; note = Phosphorothioate bond
  modified_base 2: mod_base = um
  modified_base 2^3: mod_base = OTHER; note = Phosphorothioate bond
  modified_base 3: mod_base = gm
  modified_base 4: mod_base = gm
  modified_base 5: mod_base = gm
  modified_base 6: mod_base = um
  modified_base 7: mod_base = um
  modified_base 8: mod_base = um
  modified_base 9: mod_base = OTHER; note = 2'-Fluoro-adenosine
  modified_base 10: mod_base = OTHER; note = 2'-Fluoro-uridine
  modified_base 11: mod_base = OTHER; note = 2'-Fluoro-adenosine
  modified_base 12: mod_base = um
  modified_base 13: mod_base = OTHER; note = 2'-O-methyl-adenosine
  modified_base 14: mod_base = um
  modified_base 15: mod_base = gm
  modified_base 16: mod_base = gm
  modified_base 17: mod_base = OTHER; note = 2'-O-methyl-adenosine
  modified_base 18: mod_base = um
  modified_base 19: mod_base = um
  modified_base 20: mod_base = cm
  modified_base 21: mod_base = um
atgggtttatatatggattct

SEQ ID NO: 1078 - RNA, 21 nt, synthetic construct
  source 1..21: mol_type = other RNA
  modified_base <1: mod_base = OTHER; note = two inverted abasic nucleosides
  modified_base 1: mod_base = OTHER; note = 2'-O-methyl-adenosine
  modified_base 1^2: mod_base = OTHER; note = Phosphorothioate bond
  modified_base 2: mod_base = OTHER; note = 2'-O-methyl-adenosine
  modified_base 2^3: mod_base = OTHER; note = Phosphorothioate bond
  modified_base 3: mod_base = um
  modified_base 4: mod_base = OTHER; note = 2'-O-methyl-adenosine
  modified_base 5: mod_base = um
  modified_base 6: mod_base = um
  modified_base 7: mod_base = gm
  modified_base 8: mod_base = um
  modified_base 9: mod_base = OTHER; note = 2'-Fluoro-cytidine
  modified_base 10: mod_base = OTHER; note = 2'-Fluoro-cytidine
  modified_base 11: mod_base = OTHER; note = 2'-Fluoro-adenosine
  modified_base 12: mod_base = gm
  modified_base 13: mod_base = um
  modified_base 14: mod_base = OTHER; note = 2'-O-methyl-adenosine
  modified_base 15: mod_base = cm
  modified_base 16: mod_base = OTHER; note = 2'-O-methyl-adenosine
  modified_base 17: mod_base = um
  modified_base 18: mod_base = OTHER; note = 2'-O-methyl-adenosine
  modified_base 19: mod_base = OTHER; note = 2'-O-methyl-adenosine
  modified_base 20: mod_base = OTHER; note = 2'-O-methyl-adenosine
  modified_base 21: mod_base = OTHER; note = 2'-O-methyl-adenosine
aatattgtccagtacataaaa

SEQ ID NO: 1079 - RNA, 21 nt, synthetic construct
  source 1..21: mol_type = other RNA
  modified_base <1: mod_base = OTHER; note = two inverted abasic nucleosides
  modified_base 1: mod_base = OTHER; note = 2'-O-methyl-adenosine
  modified_base 1^2: mod_base = OTHER; note = Phosphorothioate bond
  modified_base 2: mod_base = cm
  modified_base 2^3: mod_base = OTHER; note = Phosphorothioate bond
  modified_base 3: mod_base = OTHER; note = 2'-O-methyl-adenosine
  modified_base 4: mod_base = um
  modified_base 5: mod_base = um
  modified_base 6: mod_base = cm
  modified_base 7: mod_base = cm
  modified_base 8: mod_base = OTHER; note = 2'-O-methyl-adenosine
  modified_base 9: mod_base = OTHER; note = 2'-Fluoro-guanosine
  modified_base 10: mod_base = OTHER; note = 2'-Fluoro-adenosine
  modified_base 11: mod_base = OTHER; note = 2'-Fluoro-adenosine
  modified_base 12: mod_base = OTHER; note = 2'-O-methyl-adenosine
  modified_base 13: mod_base = OTHER; note = 2'-O-methyl-adenosine
  modified_base 14: mod_base = um
  modified_base 15: mod_base = gm
  modified_base 16: mod_base = um
  modified_base 17: mod_base = OTHER; note = 2'-O-methyl-adenosine
  modified_base 18: mod_base = um
  modified_base 19: mod_base = cm
  modified_base 20: mod_base = OTHER; note = 2'-O-methyl-adenosine
  modified_base 21: mod_base = OTHER; note = 2'-O-methyl-adenosine
acattccagaaaatgtatcaa

SEQ ID NO: 1080 - RNA, 21 nt, synthetic construct
  source 1..21: mol_type = other RNA
  modified_base <1: mod_base = OTHER; note = two inverted abasic nucleosides
  modified_base 1: mod_base = cm
  modified_base 1^2: mod_base = OTHER; note = Phosphorothioate bond
  modified_base 2: mod_base = um
  modified_base 2^3: mod_base = OTHER; note = Phosphorothioate bond
  modified_base 3: mod_base = cm
  modified_base 4: mod_base = um
  modified_base 5: mod_base = cm
  modified_base 6: mod_base = cm
  modified_base 7: mod_base = um
  modified_base 8: mod_base = cm
  modified_base 9: mod_base = OTHER; note = 2'-Fluoro-uridine
  modified_base 10: mod_base = OTHER; note = 2'-Fluoro-cytidine
  modified_base 11: mod_base = OTHER; note = 2'-Fluoro-uridine
  modified_base 12: mod_base = cm
  modified_base 13: mod_base = OTHER; note = 2'-O-methyl-adenosine
  modified_base 14: mod_base = OTHER; note = 2'-O-methyl-adenosine
  modified_base 15: mod_base = gm
  modified_base 16: mod_base = um
  modified_base 17: mod_base = cm
  modified_base 18: mod_base = cm
  modified_base 19: mod_base = gm
  modified_base 20: mod_base = um
  modified_base 21: mod_base = um
ctctcctctctcaagtccgtt

SEQ ID NO: 1081 - RNA, 21 nt, synthetic construct
  source 1..21: mol_type = other RNA
  modified_base <1: mod_base = OTHER; note = two inverted abasic nucleosides
  modified_base 1: mod_base = OTHER; note = 2'-O-methyl-adenosine
  modified_base 1^2: mod_base = OTHER; note = Phosphorothioate bond
  modified_base 2: mod_base = cm
  modified_base 2^3: mod_base = OTHER; note = Phosphorothioate bond
  modified_base 3: mod_base = um
  modified_base 4: mod_base = OTHER; note = 2'-O-methyl-adenosine
  modified_base 5: mod_base = OTHER; note = 2'-O-methyl-adenosine
  modified_base 6: mod_base = gm
  modified_base 7: mod_base = cm
  modified_base 8: mod_base = OTHER; note = 2'-O-methyl-adenosine
  modified_base 9: mod_base = OTHER; note = 2'-Fluoro-cytidine
  modified_base 10: mod_base = OTHER; note = 2'-Fluoro-adenosine
  modified_base 11: mod_base = OTHER; note = 2'-Fluoro-adenosine
  modified_base 12: mod_base = um
  modified_base 13: mod_base = um
  modified_base 14: mod_base = cm
  modified_base 15: mod_base = cm
  modified_base 16: mod_base = OTHER; note = 2'-O-methyl-adenosine
  modified_base 17: mod_base = OTHER; note = 2'-O-methyl-adenosine
  modified_base 18: mod_base = OTHER; note = 2'-O-methyl-adenosine
  modified_base 19: mod_base = gm
  modified_base 20: mod_base = gm
  modified_base 21: mod_base = OTHER; note = 2'-O-methyl-adenosine
actaagcacaattccaaagga

SEQ ID NO: 1082 - RNA, 21 nt, synthetic construct
  source 1..21: mol_type = other RNA
  modified_base <1: mod_base = OTHER; note = two inverted abasic nucleosides
  modified_base 1: mod_base = gm
  modified_base 1^2: mod_base = OTHER; note = Phosphorothioate bond
  modified_base 2: mod_base = OTHER; note = 2'-O-methyl-adenosine
  modified_base 2^3: mod_base = OTHER; note = Phosphorothioate bond
  modified_base 3: mod_base = gm
  modified_base 4: mod_base = cm
  modified_base 5: mod_base = um
  modified_base 6: mod_base = gm
  modified_base 7: mod_base = gm
  modified_base 8: mod_base = OTHER; note = 2'-O-methyl-adenosine
  modified_base 9: mod_base = OTHER; note = 2'-Fluoro-adenosine
  modified_base 10: mod_base = OTHER; note = 2'-Fluoro-uridine
  modified_base 11: mod_base = OTHER; note = 2'-Fluoro-cytidine
  modified_base 12: mod_base = um
  modified_base 13: mod_base = OTHER; note = 2'-O-methyl-adenosine
  modified_base 14: mod_base = OTHER; note = 2'-O-methyl-adenosine
  modified_base 15: mod_base = gm
  modified_base 16: mod_base = gm
  modified_base 17: mod_base = OTHER; note = 2'-O-methyl-adenosine
  modified_base 18: mod_base = OTHER; note = 2'-O-methyl-adenosine
  modified_base 19: mod_base = cm
  modified_base 20: mod_base = um
  modified_base 21: mod_base = um
gagctggaatctaaggaactt

SEQ ID NO: 1083 - RNA, 21 nt, synthetic construct
  source 1..21: mol_type = other RNA
  modified_base <1: mod_base = OTHER; note = two inverted abasic nucleosides
  modified_base 1: mod_base = OTHER; note = 2'-O-methyl-adenosine
  modified_base 1^2: mod_base = OTHER; note = Phosphorothioate bond
  modified_base 2: mod_base = OTHER; note = 2'-O-methyl-adenosine
  modified_base 2^3: mod_base = OTHER; note = Phosphorothioate bond
  modified_base 3: mod_base = gm
  modified_base 4: mod_base = um
  modified_base 5: mod_base = cm
  modified_base 6: mod_base = OTHER; note = 2'-O-methyl-adenosine
  modified_base 7: mod_base = cm
  modified_base 8: mod_base = um
  modified_base 9: mod_base = OTHER; note = 2'-Fluoro-guanosine
  modified_base 10: mod_base = OTHER; note = 2'-Fluoro-cytidine
  modified_base 11: mod_base = OTHER; note = 2'-Fluoro-adenosine
  modified_base 12: mod_base = gm
  modified_base 13: mod_base = um
  modified_base 14: mod_base = gm
  modified_base 15: mod_base = um
  modified_base 16: mod_base = OTHER; note = 2'-O-methyl-adenosine
  modified_base 17: mod_base = OTHER; note = 2'-O-methyl-adenosine
  modified_base 18: mod_base = OTHER; note = 2'-O-methyl-adenosine
  modified_base 19: mod_base = OTHER; note = 2'-O-methyl-adenosine
  modified_base 20: mod_base = um
  modified_base 21: mod_base = cm
aagtcactgcagtgtaaaatc

SEQ ID NO: 1084 - RNA, 21 nt, synthetic construct
  source 1..21: mol_type = other RNA
  modified_base <1: mod_base = OTHER; note = two inverted abasic nucleosides
  modified_base 1: mod_base = OTHER; note = 2'-O-methyl-adenosine
  modified_base 1^2: mod_base = OTHER; note = Phosphorothioate bond
  modified_base 2: mod_base = um
  modified_base 2^3: mod_base = OTHER; note = Phosphorothioate bond
  modified_base 3: mod_base = cm
  modified_base 4: mod_base = OTHER; note = 2'-O-methyl-adenosine
  modified_base 5: mod_base = OTHER; note = 2'-O-methyl-adenosine
  modified_base 6: mod_base = gm
  modified_base 7: mod_base = cm
  modified_base 8: mod_base = um
  modified_base 9: mod_base = OTHER; note = 2'-Fluoro-cytidine
  modified_base 10: mod_base = OTHER; note = 2'-Fluoro-uridine
  modified_base 11: mod_base = OTHER; note = 2'-Fluoro-adenosine
  modified_base 12: mod_base = cm
  modified_base 13: mod_base = um
  modified_base 14: mod_base = um
  modified_base 15: mod_base = um
  modified_base 16: mod_base = OTHER; note = 2'-O-methyl-adenosine
  modified_base 17: mod_base = cm
  modified_base 18: mod_base = gm
  modified_base 19: mod_base = OTHER; note = 2'-O-methyl-adenosine
  modified_base 20: mod_base = OTHER; note = 2'-O-methyl-adenosine
  modified_base 21: mod_base = gm
atcaagctctactttacgaag

SEQ ID NO: 1085 - RNA, 21 nt, synthetic construct
  source 1..21: mol_type = other RNA
  modified_base <1: mod_base = OTHER; note = two inverted abasic nucleosides
  modified_base 1: mod_base = gm
  modified_base 1^2: mod_base = OTHER; note = Phosphorothioate bond
  modified_base 2: mod_base = um
  modified_base 2^3: mod_base = OTHER; note = Phosphorothioate bond
  modified_base 3: mod_base = gm
  modified_base 4: mod_base = cm
  modified_base 5: mod_base = um
  modified_base 6: mod_base = OTHER; note = 2'-O-methyl-adenosine
  modified_base 7: mod_base = um
  modified_base 8: mod_base = um
  modified_base 9: mod_base = OTHER; note = 2'-Fluoro-cytidine
  modified_base 10: mod_base = OTHER; note = 2'-Fluoro-cytidine
  modified_base 11: mod_base = OTHER; note = 2'-Fluoro-adenosine
  modified_base 12: mod_base = OTHER; note = 2'-O-methyl-adenosine
  modified_base 13: mod_base = OTHER; note = 2'-O-methyl-adenosine
  modified_base 14: mod_base = cm
  modified_base 15: mod_base = OTHER; note = 2'-O-methyl-adenosine
  modified_base 16: mod_base = OTHER; note = 2'-O-methyl-adenosine
  modified_base 17: mod_base = cm
  modified_base 18: mod_base = OTHER; note = 2'-O-methyl-adenosine
  modified_base 19: mod_base = gm
  modified_base 20: mod_base = um
  modified_base 21: mod_base = OTHER; note = 2'-O-methyl-adenosine
gtgctattccaaacaacagta

SEQ ID NO: 1086 - RNA, 21 nt, synthetic construct
  source 1..21: mol_type = other RNA
  modified_base <1: mod_base = OTHER; note = two inverted abasic nucleosides
  modified_base 1: mod_base = cm
  modified_base 1^2: mod_base = OTHER; note = Phosphorothioate bond
  modified_base 2: mod_base = um
  modified_base 2^3: mod_base = OTHER; note = Phosphorothioate bond
  modified_base 3: mod_base = OTHER; note = 2'-O-methyl-adenosine
  modified_base 4: mod_base = um
  modified_base 5: mod_base = um
  modified_base 6: mod_base = cm
  modified_base 7: mod_base = cm
  modified_base 8: mod_base = OTHER; note = 2'-O-methyl-adenosine
  modified_base 9: mod_base = OTHER; note = 2'-Fluoro-adenosine
  modified_base 10: mod_base = OTHER; note = 2'-Fluoro-adenosine
  modified_base 11: mod_base = OTHER; note = 2'-Fluoro-cytidine
  modified_base 12: mod_base = OTHER; note = 2'-O-methyl-adenosine
  modified_base 13: mod_base = OTHER; note = 2'-O-methyl-adenosine
  modified_base 14: mod_base = cm
  modified_base 15: mod_base = OTHER; note = 2'-O-methyl-adenosine
  modified_base 16: mod_base = gm
  modified_base 17: mod_base = um
  modified_base 18: mod_base = OTHER; note = 2'-O-methyl-adenosine
  modified_base 19: mod_base = cm
  modified_base 20: mod_base = um
  modified_base 21: mod_base = cm
ctattccaaacaacagtactc

SEQ ID NO: 1087 - RNA, 21 nt, synthetic construct
  source 1..21: mol_type = other RNA
  modified_base <1: mod_base = OTHER; note = two inverted abasic nucleosides
  modified_base 1: mod_base = um
  modified_base 1^2: mod_base = OTHER; note = Phosphorothioate bond
  modified_base 2: mod_base = gm
  modified_base 2^3: mod_base = OTHER; note = Phosphorothioate bond
  modified_base 3: mod_base = OTHER; note = 2'-O-methyl-adenosine
  modified_base 4: mod_base = gm
  modified_base 5: mod_base = um
  modified_base 6: mod_base = cm
  modified_base 7: mod_base = cm
  modified_base 8: mod_base = OTHER; note = 2'-O-methyl-adenosine
  modified_base 9: mod_base = OTHER; note = 2'-Fluoro-guanosine
  modified_base 10: mod_base = OTHER; note = 2'-Fluoro-cytidine
  modified_base 11: mod_base = OTHER; note = 2'-Fluoro-uridine
  modified_base 12: mod_base = OTHER; note = 2'-O-methyl-adenosine
  modified_base 13: mod_base = OTHER; note = 2'-O-methyl-adenosine
  modified_base 14: mod_base = gm
  modified_base 15: mod_base = OTHER; note = 2'-O-methyl-adenosine
  modified_base 16: mod_base = um
  modified_base 17: mod_base = um
  modified_base 18: mod_base = um
  modified_base 19: mod_base = OTHER; note = 2'-O-methyl-adenosine
  modified_base 20: mod_base = um
  modified_base 21: mod_base = cm
tgagtccagctaagatttatc

SEQ ID NO: 1088 - RNA, 21 nt, synthetic construct
  source 1..21: mol_type = other RNA
  modified_base <1: mod_base = OTHER; note = two inverted abasic nucleosides
  modified_base 1: mod_base = um
  modified_base 1^2: mod_base = OTHER; note = Phosphorothioate bond
  modified_base 2: mod_base = gm
  modified_base 2^3: mod_base = OTHER; note = Phosphorothioate bond
  modified_base 3: mod_base = cm
  modified_base 4: mod_base = um
  modified_base 5: mod_base = um
  modified_base 6: mod_base = gm
  modified_base 7: mod_base = cm
  modified_base 8: mod_base = OTHER; note = 2'-O-methyl-adenosine
  modified_base 9: mod_base = OTHER; note = 2'-Fluoro-guanosine
  modified_base 10: mod_base = OTHER; note = 2'-Fluoro-adenosine
  modified_base 11: mod_base = OTHER; note = 2'-Fluoro-cytidine
  modified_base 12: mod_base = um
  modified_base 13: mod_base = um
  modified_base 14: mod_base = cm
  modified_base 15: mod_base = OTHER; note = 2'-O-methyl-adenosine
  modified_base 16: mod_base = gm
  modified_base 17: mod_base = OTHER; note = 2'-O-methyl-adenosine
  modified_base 18: mod_base = OTHER; note = 2'-O-methyl-adenosine
  modified_base 19: mod_base = OTHER; note = 2'-O-methyl-adenosine
  modified_base 20: mod_base = um
  modified_base 21: mod_base = gm
tgcttgcagacttcagaaatg

SEQ ID NO: 1089 - RNA, 21 nt, synthetic construct
  source 1..21: mol_type = other RNA
  modified_base <1: mod_base = OTHER; note = two inverted abasic nucleosides
  modified_base 1: mod_base = gm
  modified_base 1^2: mod_base = OTHER; note = Phosphorothioate bond
  modified_base 2: mod_base = um
  modified_base 2^3: mod_base = OTHER; note = Phosphorothioate bond
  modified_base 3: mod_base = OTHER; note = 2'-O-methyl-adenosine
  modified_base 4: mod_base = um
  modified_base 5: mod_base = cm
  modified_base 6: mod_base = OTHER; note = 2'-O-methyl-adenosine
  modified_base 7: mod_base = OTHER; note = 2'-O-methyl-adenosine
  modified_base 8: mod_base = gm
  modified_base 9: mod_base = OTHER; note = 2'-Fluoro-cytidine
  modified_base 10: mod_base = OTHER; note = 2'-Fluoro-uridine
  modified_base 11: mod_base = OTHER; note = 2'-Fluoro-cytidine
  modified_base 12: mod_base = um
  modified_base 13: mod_base = OTHER; note = 2'-O-methyl-adenosine
  modified_base 14: mod_base = cm
  modified_base 15: mod_base = um
  modified_base 16: mod_base = um
  modified_base 17: mod_base = um
  modified_base 18: mod_base = OTHER; note = 2'-O-methyl-adenosine
  modified_base 19: mod_base = cm
  modified_base 20: mod_base = gm
  modified_base 21: mod_base = OTHER; note = 2'-O-methyl-adenosine
gtatcaagctctactttacga

SEQ ID NO: 1090 - RNA, 21 nt, synthetic construct
  source 1..21: mol_type = other RNA
  modified_base <1: mod_base = OTHER; note = two inverted abasic nucleosides
  modified_base 1: mod_base = cm
  modified_base 1^2: mod_base = OTHER; note = Phosphorothioate bond
  modified_base 2: mod_base = cm
  modified_base 2^3: mod_base = OTHER; note = Phosphorothioate bond
  modified_base 3: mod_base = OTHER; note = 2'-O-methyl-adenosine
  modified_base 4: mod_base = gm
  modified_base 5: mod_base = um
  modified_base 6: mod_base = gm
  modified_base 7: mod_base = gm
  modified_base 8: mod_base = gm
  modified_base 9: mod_base = OTHER; note = 2'-Fluoro-uridine
  modified_base 10: mod_base = OTHER; note = 2'-Fluoro-adenosine
  modified_base 11: mod_base = OTHER; note = 2'-Fluoro-uridine
  modified_base 12: mod_base = um
  modified_base 13: mod_base = OTHER; note = 2'-O-methyl-adenosine
  modified_base 14: mod_base = OTHER; note = 2'-O-methyl-adenosine
  modified_base 15: mod_base = OTHER; note = 2'-O-methyl-adenosine
  modified_base 16: mod_base = cm
  modified_base 17: mod_base = OTHER; note = 2'-O-methyl-adenosine
  modified_base 18: mod_base = OTHER; note = 2'-O-methyl-adenosine
  modified_base 19: mod_base = gm
  modified_base 20: mod_base = OTHER; note = 2'-O-methyl-adenosine
  modified_base 21: mod_base = OTHER; note = 2'-O-methyl-adenosine
ccagtgggtattaaacaagaa

SEQ ID NO: 1091 - RNA, 21 nt, synthetic construct
  source 1..21: mol_type = other RNA
  modified_base <1: mod_base = OTHER; note = two inverted abasic nucleosides
  modified_base 1: mod_base = um
  modified_base 1^2: mod_base = OTHER; note = Phosphorothioate bond
  modified_base 2: mod_base = gm
  modified_base 2^3: mod_base = OTHER; note = Phosphorothioate bond
  modified_base 3: mod_base = um
  modified_base 4: mod_base = cm
  modified_base 5: mod_base = um
  modified_base 6: mod_base = um
  modified_base 7: mod_base = cm
  modified_base 8: mod_base = OTHER; note = 2'-O-methyl-adenosine
  modified_base 9: mod_base = OTHER; note = 2'-Fluoro-adenosine
  modified_base 10: mod_base = OTHER; note = 2'-Fluoro-guanosine
  modified_base 11: mod_base = OTHER; note = 2'-Fluoro-cytidine
  modified_base 12: mod_base = um
  modified_base 13: mod_base = gm
  modified_base 14: mod_base = gm
  modified_base 15: mod_base = OTHER; note = 2'-O-methyl-adenosine
  modified_base 16: mod_base = OTHER; note = 2'-O-methyl-adenosine
  modified_base 17: mod_base = um
  modified_base 18: mod_base = gm
  modified_base 19: mod_base = OTHER; note = 2'-O-methyl-adenosine
  modified_base 20: mod_base = OTHER; note = 2'-O-methyl-adenosine
  modified_base 21: mod_base = um
tgtcttcaagctggaatgaat

SEQ ID NO: 1092 - RNA, 21 nt, synthetic construct
  source 1..21: mol_type = other RNA
  modified_base <1: mod_base = OTHER; note = two inverted abasic nucleosides
  modified_base 1: mod_base = OTHER; note = 2'-O-methyl-adenosine
  modified_base 1^2: mod_base = OTHER; note = Phosphorothioate bond
  modified_base 2: mod_base = gm
  modified_base 2^3: mod_base = OTHER; note = Phosphorothioate bond
  modified_base 3: mod_base = um
  modified_base 4: mod_base = OTHER; note = 2'-O-methyl-adenosine
  modified_base 5: mod_base = gm
  modified_base 6: mod_base = cm
  modified_base 7: mod_base = OTHER; note = 2'-O-methyl-adenosine
  modified_base 8: mod_base = um
  modified_base 9: mod_base = OTHER; note = 2'-Fluoro-guanosine
  modified_base 10: mod_base = OTHER; note = 2'-Fluoro-adenosine
  modified_base 11: mod_base = OTHER; note = 2'-Fluoro-adenosine
  modified_base 12: mod_base = OTHER; note = 2'-O-methyl-adenosine
  modified_base 13: mod_base = um
  modified_base 14: mod_base = cm
  modified_base 15: mod_base = cm
  modified_base 16: mod_base = um
  modified_base 17: mod_base = cm
  modified_base 18: mod_base = OTHER; note = 2'-O-methyl-adenosine
  modified_base 19: mod_base = OTHER; note = 2'-O-methyl-adenosine
  modified_base 20: mod_base = um
  modified_base 21: mod_base = um
agtagcatgaaatcctcaatt

SEQ ID NO: 1093 - RNA, 21 nt, synthetic construct
  source 1..21: mol_type = other RNA
  modified_base <1: mod_base = OTHER; note = two inverted abasic nucleosides
  modified_base 1: mod_base = cm
  modified_base 1^2: mod_base = OTHER; note = Phosphorothioate bond
  modified_base 2: mod_base = cm
  modified_base 2^3: mod_base = OTHER; note = Phosphorothioate bond
  modified_base 3: mod_base = OTHER; note = 2'-O-methyl-adenosine
  modified_base 4: mod_base = cm
  modified_base 5: mod_base = um
  modified_base 6: mod_base = OTHER; note = 2'-O-methyl-adenosine
  modified_base 7: mod_base = cm
  modified_base 8: mod_base = OTHER; note = 2'-O-methyl-adenosine
  modified_base 9: mod_base = OTHER; note = 2'-Fluoro-guanosine
  modified_base 10: mod_base = OTHER; note = 2'-Fluoro-guanosine
  modified_base 11: mod_base = OTHER; note = 2'-Fluoro-adenosine
  modified_base 12: mod_base = um
  modified_base 13: mod_base = um
  modified_base 14: mod_base = gm
  modified_base 15: mod_base = gm
  modified_base 16: mod_base = um
  modified_base 17: mod_base = gm
  modified_base 18: mod_base = cm
  modified_base 19: mod_base = um
  modified_base 20: mod_base = cm
  modified_base 21: mod_base = OTHER; note = 2'-O-methyl-adenosine
ccactacaggattggtgctca

SEQ ID NO: 1094 - RNA, 21 nt, synthetic construct
  source 1..21: mol_type = other RNA
  modified_base <1: mod_base = OTHER; note = two inverted abasic nucleosides
  modified_base 1: mod_base = OTHER; note = 2'-O-methyl-adenosine
  modified_base 1^2: mod_base = OTHER; note = Phosphorothioate bond
  modified_base 2: mod_base = OTHER; note = 2'-O-methyl-adenosine
  modified_base 2^3: mod_base = OTHER; note = Phosphorothioate bond
  modified_base 3: mod_base = cm
  modified_base 4: mod_base = um
  modified_base 5: mod_base = OTHER; note = 2'-O-methyl-adenosine
  modified_base 6: mod_base = OTHER; note = 2'-O-methyl-adenosine
  modified_base 7: mod_base = gm
  modified_base 8: mod_base = um
  modified_base 9: mod_base = OTHER; note = 2'-Fluoro-guanosine
  modified_base 10: mod_base = OTHER; note = 2'-Fluoro-uridine
  modified_base 11: mod_base = OTHER; note = 2'-Fluoro-cytidine
  modified_base 12: mod_base = cm
  modified_base 13: mod_base = cm
  modified_base 14: mod_base = OTHER; note = 2'-O-methyl-adenosine
  modified_base 15: mod_base = OTHER; note = 2'-O-methyl-adenosine
  modified_base 16: mod_base = cm
  modified_base 17: mod_base = OTHER; note = 2'-O-methyl-adenosine
  modified_base 18: mod_base = OTHER; note = 2'-O-methyl-adenosine
  modified_base 19: mod_base = um
  modified_base 20: mod_base = um
  modified_base 21: mod_base = cm
aactaagtgtcccaacaattc

SEQ ID NO: 1095 - RNA, 21 nt, synthetic construct
  source 1..21: mol_type = other RNA
  modified_base <1: mod_base = OTHER; note = two inverted abasic nucleosides
  modified_base 1: mod_base = OTHER; note = 2'-O-methyl-adenosine
  modified_base 1^2: mod_base = OTHER; note = Phosphorothioate bond
  modified_base 2: mod_base = gm
  modified_base 2^3: mod_base = OTHER; note = Phosphorothioate bond
  modified_base 3: mod_base = OTHER; note = 2'-O-methyl-adenosine
  modified_base 4: mod_base = OTHER; note = 2'-O-methyl-adenosine
  modified_base 5: mod_base = OTHER; note = 2'-O-methyl-adenosine
  modified_base 6: mod_base = um
  modified_base 7: mod_base = gm
  modified_base 8: mod_base = OTHER; note = 2'-O-methyl-adenosine
  modified_base 9: mod_base = OTHER; note = 2'-Fluoro-uridine
  modified_base 10: mod_base = OTHER; note = 2'-Fluoro-uridine
  modified_base 11: mod_base = OTHER; note = 2'-Fluoro-guanosine
  modified_base 12: mod_base = cm
  modified_base 13: mod_base = OTHER; note = 2'-O-methyl-adenosine
  modified_base 14: mod_base = um
  modified_base 15: mod_base = cm
  modified_base 16: mod_base = OTHER; note = 2'-O-methyl-adenosine
  modified_base 17: mod_base = um
  modified_base 18: mod_base = um
  modified_base 19: mod_base = gm
  modified_base 20: mod_base = OTHER; note = 2'-O-methyl-adenosine
  modified_base 21: mod_base = um
agaaatgattgcatcattgat

SEQ ID NO: 1096 - RNA, 21 nt, synthetic construct
  source 1..21: mol_type = other RNA
  modified_base <1: mod_base = OTHER; note = two inverted abasic nucleosides
  modified_base 1: mod_base = um
  modified_base 1^2: mod_base = OTHER; note = Phosphorothioate bond
  modified_base 2: mod_base = gm
  modified_base 2^3: mod_base = OTHER; note = Phosphorothioate bond
  modified_base 3: mod_base = OTHER; note = 2'-O-methyl-adenosine
  modified_base 4: mod_base = gm
  modified_base 5: mod_base = OTHER; note = 2'-O-methyl-adenosine
  modified_base 6: mod_base = um
  modified_base 7: mod_base = cm
  modified_base 8: mod_base = OTHER; note = 2'-O-methyl-adenosine
  modified_base 9: mod_base = OTHER; note = 2'-Fluoro-uridine
  modified_base 10: mod_base = OTHER; note = 2'-Fluoro-uridine
  modified_base 11: mod_base = OTHER; note = 2'-Fluoro-uridine
  modified_base 12: mod_base = OTHER; note = 2'-O-methyl-adenosine
  modified_base 13: mod_base = um
  modified_base 14: mod_base = gm
  modified_base 15: mod_base = um
  modified_base 16: mod_base = cm
  modified_base 17: mod_base = um
  modified_base 18: mod_base = gm
  modified_base 19: mod_base = OTHER; note = 2'-O-methyl-adenosine
  modified_base 20: mod_base = cm
  modified_base 21: mod_base = um
tgagatcatttatgtctgact

SEQ ID NO: 1097 - RNA, 21 nt, synthetic construct
  source 1..21: mol_type = other RNA
  modified_base <1: mod_base = OTHER; note = two inverted abasic nucleosides
  modified_base 1: mod_base = OTHER; note = 2'-O-methyl-adenosine
  modified_base 1^2: mod_base = OTHER; note = Phosphorothioate bond
  modified_base 2: mod_base = um
  modified_base 2^3: mod_base = OTHER; note = Phosphorothioate bond
  modified_base 3: mod_base = OTHER; note = 2'-O-methyl-adenosine
  modified_base 4: mod_base = um
  modified_base 5: mod_base = um
  modified_base 6: mod_base = gm
  modified_base 7: mod_base = um
  modified_base 8: mod_base = cm
  modified_base 9: mod_base = OTHER; note = 2'-Fluoro-cytidine
  modified_base 10: mod_base = OTHER; note = 2'-Fluoro-adenosine
  modified_base 11: mod_base = OTHER; note = 2'-Fluoro-guanosine
  modified_base 12: mod_base = um
  modified_base 13: mod_base = OTHER; note = 2'-O-methyl-adenosine
  modified_base 14: mod_base = cm
  modified_base 15: mod_base = OTHER; note = 2'-O-methyl-adenosine
  modified_base 16: mod_base = um
  modified_base 17: mod_base = OTHER; note = 2'-O-methyl-adenosine
  modified_base 18: mod_base = OTHER; note = 2'-O-methyl-adenosine
  modified_base 19: mod_base = OTHER; note = 2'-O-methyl-adenosine
  modified_base 20: mod_base = OTHER; note = 2'-O-methyl-adenosine
  modified_base 21: mod_base = cm
atattgtccagtacataaaac

SEQ ID NO: 1098 - RNA, 21 nt, synthetic construct
  source 1..21: mol_type = other RNA
  modified_base <1: mod_base = OTHER; note = two inverted abasic nucleosides
  modified_base 1: mod_base = OTHER; note = 2'-O-methyl-adenosine
  modified_base 1^2: mod_base = OTHER; note = Phosphorothioate bond
  modified_base 2: mod_base = gm
  modified_base 2^3: mod_base = OTHER; note = Phosphorothioate bond
  modified_base 3: mod_base = cm
  modified_base 4: mod_base = OTHER; note = 2'-O-methyl-adenosine
  modified_base 5: mod_base = um
  modified_base 6: mod_base = gm
  modified_base 7: mod_base = OTHER; note = 2'-O-methyl-adenosine
  modified_base 8: mod_base = gm
  modified_base 9: mod_base = OTHER; note = 2'-Fluoro-uridine
  modified_base 10: mod_base = OTHER; note = 2'-Fluoro-cytidine
  modified_base 11: mod_base = OTHER; note = 2'-Fluoro-cytidine
  modified_base 12: mod_base = OTHER; note = 2'-O-methyl-adenosine
  modified_base 13: mod_base = gm
  modified_base 14: mod_base = cm
  modified_base 15: mod_base = um
  modified_base 16: mod_base = OTHER; note = 2'-O-methyl-adenosine
  modified_base 17: mod_base = OTHER; note = 2'-O-methyl-adenosine
  modified_base 18: mod_base = gm
  modified_base 19: mod_base = OTHER; note = 2'-O-methyl-adenosine
  modified_base 20: mod_base = um
  modified_base 21: mod_base = um
agcatgagtccagctaagatt

SEQ ID NO: 1099 - RNA, 21 nt, synthetic construct
  source 1..21: mol_type = other RNA
  modified_base <1: mod_base = OTHER; note = two inverted abasic nucleosides
  modified_base 1: mod_base = um
  modified_base 1^2: mod_base = OTHER; note = Phosphorothioate bond
  modified_base 2: mod_base = um
  modified_base 2^3: mod_base = OTHER; note = Phosphorothioate bond
  modified_base 3: mod_base = um
  modified_base 4: mod_base = gm
  modified_base 5: mod_base = OTHER; note = 2'-O-methyl-adenosine
  modified_base 6: mod_base = OTHER; note = 2'-O-methyl-adenosine
  modified_base 7: mod_base = gm
  modified_base 8: mod_base = OTHER; note = 2'-O-methyl-adenosine
  modified_base 9: mod_base = OTHER; note = 2'-Fluoro-adenosine
  modified_base 10: mod_base = OTHER; note = 2'-Fluoro-adenosine
  modified_base 11: mod_base = OTHER; note = 2'-Fluoro-uridine
  modified_base 12: mod_base = gm
  modified_base 13: mod_base = OTHER; note = 2'-O-methyl-adenosine
  modified_base 14: mod_base = gm
  modified_base 15: mod_base = gm
  modified_base 16: mod_base = OTHER; note = 2'-O-methyl-adenosine
  modified_base 17: mod_base = cm
  modified_base 18: mod_base = OTHER; note = 2'-O-methyl-adenosine
  modified_base 19: mod_base = OTHER; note = 2'-O-methyl-adenosine
  modified_base 20: mod_base = OTHER; note = 2'-O-methyl-adenosine
  modified_base 21: mod_base = um
tttgaagaaatgaggacaaat

SEQ ID NO: 1100 - RNA, 21 nt, synthetic construct
  source 1..21: mol_type = other RNA
  modified_base <1: mod_base = OTHER; note = two inverted abasic nucleosides
  modified_base 1: mod_base = um
  modified_base 1^2: mod_base = OTHER; note = Phosphorothioate bond
  modified_base 2: mod_base = cm
  modified_base 2^3: mod_base = OTHER; note = Phosphorothioate bond
  modified_base 3: mod_base = cm
  modified_base 4: mod_base = OTHER; note = 2'-O-methyl-adenosine
  modified_base 5: mod_base = OTHER; note = 2'-O-methyl-adenosine
  modified_base 6: mod_base = gm
  modified_base 7: mod_base = um
  modified_base 8: mod_base = cm
  modified_base 9: mod_base = OTHER; note = 2'-Fluoro-adenosine
  modified_base 10: mod_base = OTHER; note = 2'-Fluoro-cytidine
  modified_base 11: mod_base = OTHER; note = 2'-Fluoro-uridine
  modified_base 12: mod_base = gm
  modified_base 13: mod_base = cm
  modified_base 14: mod_base = OTHER; note = 2'-O-methyl-adenosine
  modified_base 15: mod_base = gm
  modified_base 16: mod_base = um
  modified_base 17: mod_base = gm
  modified_base 18: mod_base = um
  modified_base 19: mod_base = OTHER; note = 2'-O-methyl-adenosine
  modified_base 20: mod_base = OTHER; note = 2'-O-methyl-adenosine
  modified_base 21: mod_base = OTHER; note = 2'-O-methyl-adenosine
tccaagtcactgcagtgtaaa

SEQ ID NO: 1101 - RNA, 21 nt, synthetic construct
  source 1..21: mol_type = other RNA
  modified_base <1: mod_base = OTHER; note = two inverted abasic nucleosides
  modified_base 1: mod_base = cm
  modified_base 1^2: mod_base = OTHER; note = Phosphorothioate bond
  modified_base 2: mod_base = um
  modified_base 2^3: mod_base = OTHER; note = Phosphorothioate bond
  modified_base 3: mod_base = cm
  modified_base 4: mod_base = OTHER; note = 2'-O-methyl-adenosine
  modified_base 5: mod_base = gm
  modified_base 6: mod_base = um
  modified_base 7: mod_base = OTHER; note = 2'-O-methyl-adenosine
  modified_base 8: mod_base = cm
  modified_base 9: mod_base = OTHER; note = 2'-Fluoro-cytidine
  modified_base 10: mod_base = OTHER; note = 2'-Fluoro-adenosine
  modified_base 11: mod_base = OTHER; note = 2'-Fluoro-adenosine
  modified_base 12: mod_base = um
  modified_base 13: mod_base = OTHER; note = 2'-O-methyl-adenosine
  modified_base 14: mod_base = OTHER; note = 2'-O-methyl-adenosine
  modified_base 15: mod_base = OTHER; note = 2'-O-methyl-adenosine
  modified_base 16: mod_base = gm
  modified_base 17: mod_base = cm
  modified_base 18: mod_base = OTHER; note = 2'-O-methyl-adenosine
  modified_base 19: mod_base = OTHER; note = 2'-O-methyl-adenosine
  modified_base 20: mod_base = gm
  modified_base 21: mod_base = OTHER; note = 2'-O-methyl-adenosine
ctcagtaccaataaagcaaga

SEQ ID NO: 1102 - RNA, 21 nt, synthetic construct
  source 1..21: mol_type = other RNA
  modified_base <1: mod_base = OTHER; note = two inverted abasic nucleosides
  modified_base 1: mod_base = OTHER; note = 2'-O-methyl-adenosine
  modified_base 1^2: mod_base = OTHER; note = Phosphorothioate bond
  modified_base 2: mod_base = cm
  modified_base 2^3: mod_base = OTHER; note = Phosphorothioate bond
  modified_base 3: mod_base = cm
  modified_base 4: mod_base = gm
  modified_base 5: mod_base = OTHER; note = 2'-O-methyl-adenosine
  modified_base 6: mod_base = um
  modified_base 7: mod_base = gm
  modified_base 8: mod_base = OTHER; note = 2'-O-methyl-adenosine
  modified_base 9: mod_base = OTHER; note = 2'-Fluoro-guanosine
  modified_base 10: mod_base = OTHER; note = 2'-Fluoro-adenosine
  modified_base 11: mod_base = OTHER; note = 2'-Fluoro-adenosine
  modified_base 12: mod_base = um
  modified_base 13: mod_base = OTHER; note = 2'-O-methyl-adenosine
  modified_base 14: mod_base = OTHER; note = 2'-O-methyl-adenosine
  modified_base 15: mod_base = cm
  modified_base 16: mod_base = um
  modified_base 17: mod_base = OTHER; note = 2'-O-methyl-adenosine
  modified_base 18: mod_base = cm
  modified_base 19: mod_base = OTHER; note = 2'-O-methyl-adenosine
  modified_base 20: mod_base = um
  modified_base 21: mod_base = gm
accgatgagaataactacatg

SEQ ID NO: 1103 - RNA, 21 nt, synthetic construct
  source 1..21: mol_type = other RNA
  modified_base <1: mod_base = OTHER; note = two inverted abasic nucleosides
  modified_base 1: mod_base = OTHER; note = 2'-O-methyl-adenosine
  modified_base 1^2: mod_base = OTHER; note = Phosphorothioate bond
  modified_base 2: mod_base = um
  modified_base 2^3: mod_base = OTHER; note = Phosphorothioate bond
  modified_base 3: mod_base = cm
  modified_base 4: mod_base = um
  modified_base 5: mod_base = gm
  modified_base 6: mod_base = um
  modified_base 7: mod_base = OTHER; note = 2'-O-methyl-adenosine
  modified_base 8: mod_base = gm
  modified_base 9: mod_base = OTHER; note = 2'-Fluoro-cytidine
  modified_base 10: mod_base = OTHER; note = 2'-Fluoro-cytidine
  modified_base 11: mod_base = OTHER; note = 2'-Fluoro-cytidine
  modified_base 12: mod_base = um
  modified_base 13: mod_base = gm
  modified_base 14: mod_base = um
  modified_base 15: mod_base = OTHER; note = 2'-O-methyl-adenosine
  modified_base 16: mod_base = OTHER; note = 2'-O-methyl-adenosine
  modified_base 17: mod_base = OTHER; note = 2'-O-methyl-adenosine
  modified_base 18: mod_base = cm
  modified_base 19: mod_base = OTHER; note = 2'-O-methyl-adenosine
  modified_base 20: mod_base = OTHER; note = 2'-O-methyl-adenosine
  modified_base 21: mod_base = um
atctgtagccctgtaaacaat

SEQ ID NO: 1104 - RNA, 21 nt, synthetic construct
  source 1..21: mol_type = other RNA
  modified_base <1: mod_base = OTHER; note = two inverted abasic nucleosides
  modified_base 1: mod_base = OTHER; note = 2'-O-methyl-adenosine
  modified_base 1^2: mod_base = OTHER; note = Phosphorothioate bond
  modified_base 2: mod_base = gm
  modified_base 2^3: mod_base = OTHER; note = Phosphorothioate bond
  modified_base 3: mod_base = cm
  modified_base 4: mod_base = OTHER; note = 2'-O-methyl-adenosine
  modified_base 5: mod_base = um
  modified_base 6: mod_base = gm
  modified_base 7: mod_base = OTHER; note = 2'-O-methyl-adenosine
  modified_base 8: mod_base = OTHER; note = 2'-O-methyl-adenosine
  modified_base 9: mod_base = OTHER; note = 2'-Fluoro-adenosine
  modified_base 10: mod_base = OTHER; note = 2'-Fluoro-uridine
  modified_base 11: mod_base = OTHER; note = 2'-Fluoro-cytidine
  modified_base 12: mod_base = cm
  modified_base 13: mod_base = um
  modified_base 14: mod_base = cm
  modified_base 15: mod_base = OTHER; note = 2'-O-methyl-adenosine
  modified_base 16: mod_base = OTHER; note = 2'-O-methyl-adenosine
  modified_base 17: mod_base = um
  modified_base 18: mod_base = um
  modified_base 19: mod_base = um
  modified_base 20: mod_base = cm
  modified_base 21: mod_base = cm
agcatgaaatcctcaatttcc

SEQ ID NO: 1105 - RNA, 21 nt, synthetic construct
  source 1..21: mol_type = other RNA
  modified_base <1: mod_base = OTHER; note = two inverted abasic nucleosides
  modified_base 1: mod_base = um
  modified_base 1^2: mod_base = OTHER; note = Phosphorothioate bond
  modified_base 2: mod_base = gm
  modified_base 2^3: mod_base = OTHER; note = Phosphorothioate bond
  modified_base 3: mod_base = cm
  modified_base 4: mod_base = um
  modified_base 5: mod_base = OTHER; note = 2'-O-methyl-adenosine
  modified_base 6: mod_base = um
  modified_base 7: mod_base = um
  modified_base 8: mod_base = cm
  modified_base 9: mod_base = OTHER; note = 2'-Fluoro-cytidine
  modified_base 10: mod_base = OTHER; note = 2'-Fluoro-adenosine
  modified_base 11: mod_base = OTHER; note = 2'-Fluoro-adenosine
  modified_base 12: mod_base = OTHER; note = 2'-O-methyl-adenosine
  modified_base 13: mod_base = cm
  modified_base 14: mod_base = OTHER; note = 2'-O-methyl-adenosine
  modified_base 15: mod_base = OTHER; note = 2'-O-methyl-adenosine
  modified_base 16: mod_base = cm
  modified_base 17: mod_base = OTHER; note = 2'-O-methyl-adenosine
  modified_base 18: mod_base = gm
  modified_base 19: mod_base = um
  modified_base 20: mod_base = OTHER; note = 2'-O-methyl-adenosine
  modified_base 21: mod_base = cm
tgctattccaaacaacagtac

SEQ ID NO: 1106 - RNA, 21 nt, synthetic construct
  source 1..21: mol_type = other RNA
  modified_base <1: mod_base = OTHER; note = two inverted abasic nucleosides
  modified_base 1: mod_base = cm
  modified_base 1^2: mod_base = OTHER; note = Phosphorothioate bond
  modified_base 2: mod_base = um
  modified_base 2^3: mod_base = OTHER; note = Phosphorothioate bond
  modified_base 3: mod_base = gm
  modified_base 4: mod_base = cm
  modified_base 5: mod_base = OTHER; note = 2'-O-methyl-adenosine
  modified_base 6: mod_base = gm
  modified_base 7: mod_base = um
  modified_base 8: mod_base = gm
  modified_base 9: mod_base = OTHER; note = 2'-Fluoro-uridine
  modified_base 10: mod_base = OTHER; note = 2'-Fluoro-adenosine
  modified_base 11: mod_base = OTHER; note = 2'-Fluoro-adenosine
  modified_base 12: mod_base = OTHER; note = 2'-O-methyl-adenosine
  modified_base 13: mod_base = OTHER; note = 2'-O-methyl-adenosine
  modified_base 14: mod_base = um
  modified_base 15: mod_base = cm
  modified_base 16: mod_base = um
  modified_base 17: mod_base = cm
  modified_base 18: mod_base = cm
  modified_base 19: mod_base = OTHER; note = 2'-O-methyl-adenosine
  modified_base 20: mod_base = gm
  modified_base 21: mod_base = um
ctgcagtgtaaaatctccagt

SEQ ID NO: 1107 - RNA, 21 nt, synthetic construct
  source 1..21: mol_type = other RNA
  modified_base <1: mod_base = OTHER; note = two inverted abasic nucleosides
  modified_base 1: mod_base = OTHER; note = 2'-O-methyl-adenosine
  modified_base 1^2: mod_base = OTHER; note = Phosphorothioate bond
  modified_base 2: mod_base = OTHER; note = 2'-O-methyl-adenosine
  modified_base 2^3: mod_base = OTHER; note = Phosphorothioate bond
  modified_base 3: mod_base = gm
  modified_base 4: mod_base = OTHER; note = 2'-O-methyl-adenosine
  modified_base 5: mod_base = cm
  modified_base 6: mod_base = um
  modified_base 7: mod_base = OTHER; note = 2'-O-methyl-adenosine
  modified_base 8: mod_base = um
  modified_base 9: mod_base = OTHER; note = 2'-Fluoro-uridine
  modified_base 10: mod_base = OTHER; note = 2'-Fluoro-adenosine
  modified_base 11: mod_base = OTHER; note = 2'-Fluoro-uridine
  modified_base 12: mod_base = um
  modified_base 13: mod_base = cm
  modified_base 14: mod_base = cm
  modified_base 15: mod_base = cm
  modified_base 16: mod_base = um
  modified_base 17: mod_base = OTHER; note = 2'-O-methyl-adenosine
  modified_base 18: mod_base = um
  modified_base 19: mod_base = cm
  modified_base 20: mod_base = OTHER; note = 2'-O-methyl-adenosine
  modified_base 21: mod_base = gm
aagactattattccctatcag

SEQ ID NO: 1108 - RNA, 21 nt, synthetic construct
  source 1..21: mol_type = other RNA
  modified_base <1: mod_base = OTHER; note = two inverted abasic nucleosides
  modified_base 1: mod_base = um
  modified_base 1^2: mod_base = OTHER; note = Phosphorothioate bond
  modified_base 2: mod_base = gm
  modified_base 2^3: mod_base = OTHER; note = Phosphorothioate bond
  modified_base 3: mod_base = cm
  modified_base 4: mod_base = um
  modified_base 5: mod_base = gm
  modified_base 6: mod_base = cm
  modified_base 7: mod_base = um
  modified_base 8: mod_base = OTHER; note = 2'-O-methyl-adenosine
  modified_base 9: mod_base = OTHER; note = 2'-Fluoro-cytidine
  modified_base 10: mod_base = OTHER; note = 2'-Fluoro-uridine
  modified_base 11: mod_base = OTHER; note = 2'-Fluoro-adenosine
  modified_base 12: mod_base = OTHER; note = 2'-O-methyl-adenosine
  modified_base 13: mod_base = gm
  modified_base 14: mod_base = cm
  modified_base 15: mod_base = OTHER; note = 2'-O-methyl-adenosine
  modified_base 16: mod_base = cm
  modified_base 17: mod_base = OTHER; note = 2'-O-methyl-adenosine
  modified_base 18: mod_base = OTHER; note = 2'-O-methyl-adenosine
  modified_base 19: mod_base = um
  modified_base 20: mod_base = um
  modified_base 21: mod_base = cm
tgctgctactaagcacaattc

SEQ ID NO: 1109 - RNA, 21 nt, synthetic construct
  source 1..21: mol_type = other RNA
  modified_base <1: mod_base = OTHER; note = two inverted abasic nucleosides
  modified_base 1: mod_base = cm
  modified_base 1^2: mod_base = OTHER; note = Phosphorothioate bond
  modified_base 2: mod_base = OTHER; note = 2'-O-methyl-adenosine
  modified_base 2^3: mod_base = OTHER; note = Phosphorothioate bond
  modified_base 3: mod_base = OTHER; note = 2'-O-methyl-adenosine
  modified_base 4: mod_base = cm
  modified_base 5: mod_base = OTHER; note = 2'-O-methyl-adenosine
  modified_base 6: mod_base = cm
  modified_base 7: mod_base = cm
  modified_base 8: mod_base = um
  modified_base 9: mod_base = OTHER; note = 2'-Fluoro-guanosine
  modified_base 10: mod_base = OTHER; note = 2'-Fluoro-adenosine
  modified_base 11: mod_base = OTHER; note = 2'-Fluoro-guanosine
  modified_base 12: mod_base = um
  modified_base 13: mod_base = um
  modified_base 14: mod_base = cm
  modified_base 15: mod_base = cm
  modified_base 16: mod_base = um
  modified_base 17: mod_base = um
  modified_base 18: mod_base = um
  modified_base 19: mod_base = cm
  modified_base 20: mod_base = cm
  modified_base 21: mod_base = um
caacacctgagttcctttcct

SEQ ID NO: 1110 - RNA, 21 nt, synthetic construct
  source 1..21: mol_type = other RNA
  modified_base <1: mod_base = OTHER; note = two inverted abasic nucleosides
  modified_base 1: mod_base = um
  modified_base 1^2: mod_base = OTHER; note = Phosphorothioate bond
  modified_base 2: mod_base = gm
  modified_base 2^3: mod_base = OTHER; note = Phosphorothioate bond
  modified_base 3: mod_base = um
  modified_base 4: mod_base = OTHER; note = 2'-O-methyl-adenosine
  modified_base 5: mod_base = OTHER; note = 2'-O-methyl-adenosine
  modified_base 6: mod_base = gm
  modified_base 7: mod_base = OTHER; note = 2'-O-methyl-adenosine
  modified_base 8: mod_base = gm
  modified_base 9: mod_base = OTHER; note = 2'-Fluoro-adenosine
  modified_base 10: mod_base = OTHER; note = 2'-Fluoro-uridine
  modified_base 11: mod_base = OTHER; note = 2'-Fluoro-guanosine
  modified_base 12: mod_base = cm
  modified_base 13: mod_base = um
  modified_base 14: mod_base = gm
  modified_base 15: mod_base = OTHER; note = 2'-O-methyl-adenosine
  modified_base 16: mod_base = cm
  modified_base 17: mod_base = um
  modified_base 18: mod_base = OTHER; note = 2'-O-methyl-adenosine
  modified_base 19: mod_base = um
  modified_base 20: mod_base = um
  modified_base 21: mod_base = cm
tgtaagagatgctgactattc

SEQ ID NO: 1111 - RNA, 21 nt, synthetic construct
  source 1..21: mol_type = other RNA
  modified_base <1: mod_base = OTHER; note = two inverted abasic nucleosides
  modified_base 1: mod_base = OTHER; note = 2'-O-methyl-adenosine
  modified_base 1^2: mod_base = OTHER; note = Phosphorothioate bond
  modified_base 2: mod_base = um
  modified_base 2^3: mod_base = OTHER; note = Phosphorothioate bond
  modified_base 3: mod_base = cm
  modified_base 4: mod_base = um
  modified_base 5: mod_base = OTHER; note = 2'-O-methyl-adenosine
  modified_base 6: mod_base = um
  modified_base 7: mod_base = cm
  modified_base 8: mod_base = um
  modified_base 9: mod_base = OTHER; note = 2'-Fluoro-guanosine
  modified_base 10: mod_base = OTHER; note = 2'-Fluoro-uridine
  modified_base 11: mod_base = OTHER; note = 2'-Fluoro-adenosine
  modified_base 12: mod_base = gm
  modified_base 13: mod_base = cm
  modified_base 14: mod_base = cm
  modified_base 15: mod_base = cm
  modified_base 16: mod_base = um
  modified_base 17: mod_base = gm
  modified_base 18: mod_base = um
  modified_base 19: mod_base = OTHER; note = 2'-O-methyl-adenosine
  modified_base 20: mod_base = OTHER; note = 2'-O-methyl-adenosine
  modified_base 21: mod_base = OTHER; note = 2'-O-methyl-adenosine
atctatctgtagccctgtaaa

SEQ ID NO: 1112 - RNA, 21 nt, synthetic construct
  source 1..21: mol_type = other RNA
  modified_base <1: mod_base = OTHER; note = two inverted abasic nucleosides
  modified_base 1: mod_base = gm
  modified_base 1^2: mod_base = OTHER; note = Phosphorothioate bond
  modified_base 2: mod_base = cm
  modified_base 2^3: mod_base = OTHER; note = Phosphorothioate bond
  modified_base 3: mod_base = um
  modified_base 4: mod_base = um
  modified_base 5: mod_base = gm
  modified_base 6: mod_base = cm
  modified_base 7: mod_base = OTHER; note = 2'-O-methyl-adenosine
  modified_base 8: mod_base = gm
  modified_base 9: mod_base = OTHER; note = 2'-Fluoro-adenosine
  modified_base 10: mod_base = OTHER; note = 2'-Fluoro-cytidine
  modified_base 11: mod_base = OTHER; note = 2'-Fluoro-uridine
  modified_base 12: mod_base = um
  modified_base 13: mod_base = cm
  modified_base 14: mod_base = OTHER; note = 2'-O-methyl-adenosine
  modified_base 15: mod_base = gm
  modified_base 16: mod_base = OTHER; note = 2'-O-methyl-adenosine
  modified_base 17: mod_base = OTHER; note = 2'-O-methyl-adenosine
  modified_base 18: mod_base = OTHER; note = 2'-O-methyl-adenosine
  modified_base 19: mod_base = um
  modified_base 20: mod_base = gm
  modified_base 21: mod_base = um
gcttgcagacttcagaaatgt

SEQ ID NO: 1113 - RNA, 21 nt, synthetic construct
  source 1..21: mol_type = other RNA
  modified_base <1: mod_base = OTHER; note = two inverted abasic nucleosides
  modified_base 1: mod_base = cm
  modified_base 1^2: mod_base = OTHER; note = Phosphorothioate bond
  modified_base 2: mod_base = um
  modified_base 2^3: mod_base = OTHER; note = Phosphorothioate bond
  modified_base 3: mod_base = um
  modified_base 4: mod_base = um
  modified_base 5: mod_base = OTHER; note = 2'-O-methyl-adenosine
  modified_base 6: mod_base = gm
  modified_base 7: mod_base = um
  modified_base 8: mod_base = gm
  modified_base 9: mod_base = OTHER; note = 2'-Fluoro-guanosine
  modified_base 10: mod_base = OTHER; note = 2'-Fluoro-adenosine
  modified_base 11: mod_base = OTHER; note = 2'-Fluoro-guanosine
  modified_base 12: mod_base = um
  modified_base 13: mod_base = cm
  modified_base 14: mod_base = OTHER; note = 2'-O-methyl-adenosine
  modified_base 15: mod_base = um
  modified_base 16: mod_base = gm
  modified_base 17: mod_base = gm
  modified_base 18: mod_base = OTHER; note = 2'-O-methyl-adenosine
  modified_base 19: mod_base = OTHER; note = 2'-O-methyl-adenosine
  modified_base 20: mod_base = OTHER; note = 2'-O-methyl-adenosine
  modified_base 21: mod_base = um
ctttagtggagtcatggaaat

SEQ ID NO: 1114 - RNA, 21 nt, synthetic construct
  source 1..21: mol_type = other RNA
  modified_base <1: mod_base = OTHER; note = two inverted abasic nucleosides
  modified_base 1: mod_base = um
  modified_base 1^2: mod_base = OTHER; note = Phosphorothioate bond
  modified_base 2: mod_base = gm
  modified_base 2^3: mod_base = OTHER; note = Phosphorothioate bond
  modified_base 3: mod_base = OTHER; note = 2'-O-methyl-adenosine
  modified_base 4: mod_base = gm
  modified_base 5: mod_base = gm
  modified_base 6: mod_base = OTHER; note = 2'-O-methyl-adenosine
  modified_base 7: mod_base = cm
  modified_base 8: mod_base = OTHER; note = 2'-O-methyl-adenosine
  modified_base 9: mod_base = OTHER; note = 2'-Fluoro-adenosine
  modified_base 10: mod_base = OTHER; note = 2'-Fluoro-adenosine
  modified_base 11: mod_base = OTHER; note = 2'-Fluoro-uridine
  modified_base 12: mod_base = um
  modified_base 13: mod_base = OTHER; note = 2'-O-methyl-adenosine
  modified_base 14: mod_base = cm
  modified_base 15: mod_base = OTHER; note = 2'-O-methyl-adenosine
  modified_base 16: mod_base = um
  modified_base 17: mod_base = cm
  modified_base 18: mod_base = OTHER; note = 2'-O-methyl-adenosine
  modified_base 19: mod_base = OTHER; note = 2'-O-methyl-adenosine
  modified_base 20: mod_base = OTHER; note = 2'-O-methyl-adenosine
  modified_base 21: mod_base = gm
tgaggacaaattacatcaaag

SEQ ID NO: 1115 - RNA, 21 nt, synthetic construct
  source 1..21: mol_type = other RNA
  modified_base <1: mod_base = OTHER; note = two inverted abasic nucleosides
  modified_base 1: mod_base = um
  modified_base 1^2: mod_base = OTHER; note = Phosphorothioate bond
  modified_base 2: mod_base = um
  modified_base 2^3: mod_base = OTHER; note = Phosphorothioate bond
  modified_base 3: mod_base = cm
  modified_base 4: mod_base = cm
  modified_base 5: mod_base = gm
  modified_base 6: mod_base = gm
  modified_base 7: mod_base = um
  modified_base 8: mod_base = gm
  modified_base 9: mod_base = OTHER; note = 2'-Fluoro-cytidine
  modified_base 10: mod_base = OTHER; note = 2'-Fluoro-uridine
  modified_base 11: mod_base = OTHER; note = 2'-Fluoro-adenosine
  modified_base 12: mod_base = um
  modified_base 13: mod_base = um
  modified_base 14: mod_base = cm
  modified_base 15: mod_base = cm
  modified_base 16: mod_base = OTHER; note = 2'-O-methyl-adenosine
  modified_base 17: mod_base = OTHER; note = 2'-O-methyl-adenosine
  modified_base 18: mod_base = OTHER; note = 2'-O-methyl-adenosine
  modified_base 19: mod_base = cm
  modified_base 20: mod_base = OTHER; note = 2'-O-methyl-adenosine
  modified_base 21: mod_base = OTHER; note = 2'-O-methyl-adenosine
ttccggtgctattccaaacaa

SEQ ID NO: 1116 - DNA, 365937 bp, Homo sapiens
  source 1..365937: mol_type = genomic DNA
attgctctacccaccgtcagcagggcgactgccactgccgggattatcatcctctccatcctcaccgccgatcagccaatattggacttgctggtggcggcggcagcagcggcggcgggagtctagccgttccccttcccccgccccagcctccccaccatgtcctagaaaaggtgagtgcagcgacagtcactttgcgctgacagcggcgagagggggtccggagagcgcaggggcggccccgggcaaggcaggttgcgcgcccagggcagagggcgcgggttggcgagcggaggtgggatgcgggcaggagacgagttgcccgctggcggccctggggcaagggtgctgggtggcgggcgagtgatcgcggcggctgcccctgcacggttctaacctagattttgcaagaagctgagatccagggcaagaccggccctcctcaaaggagataaaaacttagtaaaagagacacgtccattcctttaataatgaataattcggcaacgcttgcggagccgccgccgcctcgcgtgcccaggctctaggtccgggactccccttgctcccgcccgccgcccgcgctctgccgacgtgagatcgatgcccagttcgctgggccgggagagtgcgcgtgacggtgggccccgcgggaaagttgggacgctcggcggggactcctggctgcggggacgccgggggcagctccaagctggggaccgaggggcattagagtctggggtcaggaccagctcgcggcgctgccgctgtcgcccctatctccagggagttcctgactggagcggctgagagttcaagtctcagccctgggttaggggtccggaatcccggagcttaactaactgttaaggagaggaggggcctttgggcacagggtgtcccccggtcccccgcctcgggctttggcgggcgcgaagcgagggtgaggcgggaggccgcacagctgccgccgccgggctgcgggtcgccgagggccgggggaccagatttaggtgtatacgtcactgatgctgactccgggccagcggggagcctaaaacggggccttacatgagaagcctaaaagtccttagaaatcaaagttaggaaccccatccttttgcttagtaactgcagcatttgggtgggcgggaggagaatcgaggagggggcggttggagggaaaccgaaatttcttcatgcagacaaccgatccttagaaaacagtttggttccttcccccctcctgtctgtttctcccacttatgtgacccaccccctccacccattataacgtgaatatcctcgatggtaagcttgctttcaaattgaactagtggaaaaatccaatactaaagtagtaagtacagtgacaaaattataaggaagtagaggagcagctcttgaccctgccacttctttcatttatctttctctctctctcttttttttttttttttttttttttttttttttggtgttaggggtctaagggatgggaggaaagctgtgtttaaagggtttttccagcacggttaaaacaactaaattcaaatcgagtgaacgtgatcgtcttgctcgctggcagcgaaggctgctgctgctctgctgagaggtaactctggagacagtggaaaggggctgggagaggaacctcgagggtcgggtgaagcccacccagagtcctccccgcgcgcggacgctgttgggcggcgccagggtctgggctgcagctcacctggagctgcaggtggagagcgtgaggggacgacactttgctcgcggaaaaaccgacttcttccgcgtcagcacacttttcacatctctccagatatcctggggtcggtcagaaggagagcagggtggacgtaagcaagtttggggcggccgagcgatgggggtgggggcagcgtgcggaggccgcctgatgtagccaccgcccggcaccccaagctcccgccgcggctgcggctttaaggaagctgccgagtccaggctgtgtcgcagcaactttgtatcagtcatgtcgcccgcctggtgactgacagcctggattgtccaataagaagcccgcctgacccgtgcggcgtggagccttgcttctcttcgggccaataggaagggttcaggggggcgggatagcaacctgaactttatctggacatgtgacccgcttttaaaagggccagccctccagctggcccactccccctccgggctttcgcccgccctctctccctcccttttttgcccgccctggccctgcccctgcccctgccccctcctctcagcccctccgcgcccggggtgtcattgggcccgggagacgggagccaacttcaggctgctcagaggaagcccgtgcagtcagtcacctgggtgcaagagcgttgctgcctcgggctctcccgctgcagggagagcggcactcgctggcctggatgtggttggatttaggggggctccgcagcaggggtttcgtggcggtggcaagcgctgcaacaggtagacggcgagagacggaccccggccgaggcaggtgtgtaggggcgcgcggcggggcaccgcttgccgtgctcggcgtgcggccgcggcgcgggagcgtgcactttgcagggagaagtggctgcgtaatccggaggcacagtcagtatggtgctgtgtgcttgttgttttgttttggttttccacttttctccccctttggccgccagaggactattttgggaaagtttggccactttggataaatgccctctaactagcagcttttaactgcctttggcagtgggaggtctaccacccttccctttacccaaagatgaatttcggatcattttccctgtacaatttttaaaggacgtttgaataatatttctttcctttatcaattgcggacgctcccaaatctcagccggaggtgtagcgcataagggcagttgaaggagatatagatcctaatagatcctgtataaaaggggctctggaaattcgtgcatttcccgttcgctagcattcgcgaaactcttgagacaggctacgcttcctatggcatcagttggaattttaagggcaagggagaaggggacgaagcttcttttggtggcatccttactctgctactgaattttaggtgcgtggctttgcctactcaatttaaaaagaccaggtttaaataataatggtttatggcaccatcagttttaattatttattatgacataggagttaggaaaacttttgatagcagacgagcttttgaaaccgccgaattttaaaggcaccaaattgcttcctaacattttgtattgccatttctctaggtgctgttattgatgatatttacatagtaatgataacagcattctccatctgtgaagtcctgctgtgaagtttaaattttatgtttgacatcgtggcagctatcatggaaaagcttgagaggagaagttttaaaaaataatttaaagtggagctttttcctttaagggaggcatagttttgtttggcgatttttggaaagatcaggtggctcggtaaattaggtgagtgaatagaaatcaggtgtgctcagttctaactggttctcccgctctctcaggtgaccttgggcagatttctatcatttacctcatctataaaagagaggaacataatagttatgtagtggggaatgacaaaaaatagttacatatagtgaacttttacaactatgcagtctatagatgattgtgagattcttaagctttagtctttaaagtgccatcttatagtcaaataaatataaaaaagatgccttttctatcatttccatcatgatgagattgggttttgggggttactaaaagtgaaagtgtttccagataaaatacaaattcgcaaggatctttgttaatattcccgaaaaaagtacttctttatggaaaagggcaatttaacacagactgtaaaacgtaaaactttaaggttttcctttgtgaaaacagcatttcttttgtgtttgagagcatatgtatggcttaaagtagcacctccaccagtgcttttcctttagtgaatttttttttgtgttttggggcgaggcccatttgcatgaaaattaaaagttcataatgttttttgcatttgtcctaagagaatctttggtatggtttccattgtgaggcaggcaagcctgatttttgttagttagatttgtatacctctatctgcttcattttatactttagtaacataaactttttctttatcctctagatattaagttctatgaggatcatattcatcgactagtattttcagtattcactagttagtacaggttgactgaaattctgctcaagccatggtcattgtgccagttgcaaaaagataacctctgcttcctggatgacatagtaaataaattcctaactggacccatttgtttacagaaaagactaattaaaatactagggagactcaaaatatttcaataatgctatttgaaaaatatctgatcttaaaaaaatgtttgtgtagaagccgtgcagatgctagatgtcttgtattcttttgtgtttgactattgccaatctgtattgtttcctttgttgagaggtgcattaggttggtagatgagaataccttaaacaaagtaatttagatttcagcaaagccttttgcaaattccttaatgagactcctgtcaataatgtggtgaaacacagcctattttatgttattaagggagttcaaggttagccaaacaggacttggaaagttgtgatcagctgtatgatgttagctggtaaggtgctaccttgtccagggctttaagactgtctttggtacccatcatctccagtatagattctcttcaggtcttccgtagcctcacaaatgtgggatatggttcttgctttagggcagagtgccgaaaagtgcagaatcttagtagatgttctttgagaaaaaggtggagtggtcaaattatttgaggaatgctggattaaaaagtaaacagaatctcccagaggttttgatatgcaaatttatatagggaaatttcaaaaaagccaagagtggaccgcccttcccaaaagacaatttggagaatgggttttggagaggggtctgggtgggggtccccttcagacacgggacagagagccctcttgactatgaccaggaagagaatgaggctatgtgagtgacgcagagtgtgccagtgaaggccttcaggtaaagctgttgagacaagagtaacttccaggcatctggttagatggtggtgcagtttgccaagagagcgaatgtgaatttgggggtgtgtggggggagagatgtgcagaaagtgttcagttttgaatacaaatagacatatttattgtgttgtttaatggatttggatctgaaccatttataccttagctatatagtaatttatctttagtatggggaagacaaaatattcttaggtagaaatagaagcagcatataatatttactgctatttttcaatacatagctatgactaaatggttttttagtaaagcataaaaggccagtcttagctatttggatcccaattcactgttttttagtttagttttctatcagcttttacttggctttcatccacaccaaacattttggctggaattactattaatagataactacctcaacctttgtaattttatttattttctactgttttgtgattgatttttgattaggaattcataggatgttctttaagtgaaaacatactacataattggtagattttaatgtttggaaattgagcattgatattataatagttgaaaattttttcaatgtatccacttgggatactgtagtgaaattgatcatttctgccctttgagaaggtaaactctagtgtaaaaacacagaaaagtaagaggtaattataatacttggacaatttggacattaaatttcttcatagggctttgtgctatctaatgcaaatttatttatgagtccagctaagatttatctaatgcaaatttatttagtagcattatttttcaatgttaatacatattctgtaacaaaaggacttcgtgttttttgtttttttttaaatgaagggaaggtaggcagggtggagatagtgacaaagaggggaaaggatgagaggccaaaaataaaacttgtgtatagaatggcagaaacagcatcttttagatcaggactttttttgggccatagattgtttacagactttgaaatgtttgaaaaatgcataatacagattttaggagttttaaaatactaaaatgtaaaaataaaattttactgtgagtgagttaatttcctttaagatatgtttctttacagtggtggttgtcagccaagggtgattttgccccccatgggcatttggtaatgtctggagacattttcagttgtcacaactggggaggtggaatgctactggcatctagtgggtaggggttagggatactgctaaacgccttagcaatgcattattgacctccacaactaagaattatcaggcccaaaatgtcaatgtgccaagattgagaaactgtatagagagagacttgcgatcaaattgcagctccaacacttggttgtgtgtctggtgcctcagttttcacacttgtattatttggataatacttttatcagtcattcagggttgtgtgtaaggataaatgaattaatatatgcaagaagcttgcaatactgcattaaattatatgggtaagaattatatcaatatagcctattatgaagattctgtctgtgaagtaaattgatctatagagcgcatggatatggttatatatctgaaacaacctggtgggttgcttgaggatggggattgtgtctcttttgtttatcactgcctgttcactgactggtctaaggccaagggtgtagcaggcacttggtaaatattgttgaatgaatgaatgaatgcttaaattttcggggctcctctcaaaagtcaccatttaccattgagagtaaacatttctggttgttggcagtcgttctagcagaggtaccactggtaccatgcacaggtcagggtgcatgtcaaagtccttgccagtactgaaatacagagaagacaccagtcattcctgaattgtcatacagcccttctgagatatggaccatctttatcagaatgtatagatcttttcagaactgacattaaattatcttcatcactaatctaaagagagtcttacttttaaaaaaatcaaaaattatttttcctatgataattcacttggtatgtttatgtttggaaagagtaactttaattacatttccatattgtttttaacaaggccatgaattaaatatggaaggcagcttctatatgatccaaagactccaaaggcattggagtcaaaagatttagatttaaacccaactttgtcaccatgtctttgactttgggcaagccacccacttcactaagtcctcagttacctttttttgcctgccttaataattcccaggattactttgaatatctaataagttaacatttgtaaatattttttgcagactctaaagactgtattatagcaaacatgttacttttatttagatccaaaacagttttatatgatcgcttctcttgttctgacatctcgacaagctgtagtcaatactctgttatgtcagcatccaaaaaggtaacagttttaaattagctagaaatgttgctcataataagtagaatatgttttgtggcttagcaaatgcaattttagaatgtcttttagagtaatattgctataactgactctaattttttaatgtaaatttatttgttagcgatggagaccaaaggctaccacagtctccctgaaggtctagatatggaaagacggtggggtcaagtttctcaggctgtggagcgttcttccctgggacctacagagaggaccgatgagaataactacatggagattgtcaacgtaagctgtgtttccggtgctattccaaacaacagtactcaaggaagcagcaaagaaaaacaagaactactcccttgccttcagcaagacaataatcggcctgggattttaacatctgatattaaaactgagctggaatctaaggaactttcagcaactgtagctgagtccatgggtttatatatggattctgtaagagatgctgactattcctatgagcagcagaaccaacaaggaagcatgagtccagctaagatttatcagaatgttgaacagctggtgaaattttacaaaggaaatggccatcgtccttccactctaagttgtgtgaacacgcccttgagatcatttatgtctgactctgggagctccgtgaatggtggcgtcatgcgcgccgttgttaaaagccctatcatgtgtcatgagaaaagcccgtctgtttgcagccctctgaacatgacatcttcggtttgcagccctgctggaatcaactctgtgtcctccaccacagccagctttggcagttttccagtgcacagcccaatcacccagggaactcctctgacatgctcccctaatgttgaaaatcgaggctccaggtcgcacagccctgcacatgctagcaatgtgggctctcctctctcaagtccgttaagtagcatgaaatcctcaatttccagccctccaagtcactgcagtgtaaaatctccagtctccagtcccaataatgtcactctgagatcctctgtgtctagccctgcaaatattaacaactcaaggtgctctgtttccagcccttcgaacactaataacagatccacgctttccagtccggcagccagtactgtgggatctatctgtagccctgtaaacaatgccttcagctacactgcttctggcacctctgctggatccagtacattgcgggatgtggttcccagtccagacacgcaggagaaaggtgctcaagaggtcccttttcctaagactgaggaagtagagagtgccatctcaaatggtgtgactggccagcttaatattgtccagtacataaaaccagaaccagatggagcttttagcagctcatgtctaggaggaaatagcaaaataaattcggattcttcattctcagtaccaataaagcaagaatcaaccaagcattcatgttcaggcacctcttttaaagggaatccaacagtaaacccgtttccatttatggatggctcgtatttttcctttatggatgataaagactattattccctatcaggaattttaggaccacctgtgcccggctttgatggtaactgtgaaggcagcggattcccagtgggtattaaacaagaaccagatgatgggagctattacccagaggccagcatcccttcctctgctattgttggggtgaattcaggtggacagtccttccactacaggattggtgctcaaggtacaatatctttatcacgatcggctagagaccaatctttccaacacctgagttcctttcctcctgtcaatactttagtggagtcatggaaatcacacggcgacctgtcgtctagaagaagtgatgggtatccggtcttagaatacattccagaaaatgtatcaaggtaagttggttttctccatttttttggaagtcatggctttatacatgttgaaggttagcattatctttacagttgataaatttaaacacatttcagattactgttttaaggatggtcatatgttgctccactttgcatgttgatataatgttatttttttgaagtagagggaaaaagcattcttaaaatgtcttagaaaatatctgcattgattttgaaggggcatatgtaggtgtcccgcactccccatttcctgttttaggtgttcggaaaatttatgttttactgccagttactattgtaaatacagtaatttagcagaccagtactagattttttttcctttagctgtttgccggtttactaaaattgctttaagttagtttatttgtggtcttagtccttttttttattatggctttctttattaatcatcacttcatcggttgtgaaagctaaaattgaatcctgtatctgttacccacaggcttccctcccttctgcccttttctaagtaggttaattatatgaaagttgtggtttttcaatacaaataaatcatttccttaactgttgagagcttttaaagactcagcatatctaaaattactaagtggacaatcttgctttcttacttatattggaagtgaaatatgtcactgcagttttgaattggtatatttataacttttcagatctgcaagaagacatattttatttactgtaaaatatctcttggctttccttgttgcagatagcatgttgtatatatttagaaaaaacaaggaagaggttttagatatgactataaagggtggttctaagttatacagtgaatacttggattggactttgcttcagtactgtttttattacatggttgtgataaattattcctttatggactatataaagaatagatttccttagtatagttcattcctttggcatccagaactatgtggatagtttcctttatttcattaaaaattattttgtggggaatatgtccatcccattaacaggatatagggtttacatgtattgctgtggctttctcttattctatttttttccaaaccaaaagcaaaaactttatgtattcttcttattgtcattgcctcaaaccttgcttttcttgcttatggaagcaaacatttcataaaggatacatttttatagtttccccacagcatgaactatttaatcatattctgatgctgtctcttaaattataagttctaacacaagtcatgagatagcatggctgccatcagaaccaaattgagcatgtgttttactgctagtgctttgctttacttttagagaaggacttttttcatgtgttgtgaatatttttgtaaatgatgtttttagtgagctggtatgaggtagtatagcctggtagttaacagcataactggttgaaatcccaactctgctacttaattgtttagttttctcaactgtataaggggattaaatagtacccatctcaaaggtagttaagacaatttaaatgagataatttatgagaaatactttgaattccttccagtatgttagtatgcattgtatatgttttgctattatgaaattgttttataatttttagttttcatatttttagttttctttttcttcattgtatgaaattccacagaatcttataaagaaatacttaaaatatttaagcacttgttaaagtaaatatttgataatctcttatgattaaactcatattttaaaaatgattatgcactatacctttgttattacagttctatttatgcttttttatttttgaaaactattgctttgagtaatgatgtttctggtagaaatattacagatgcagtaagctcaaatgattgtctcttatgtttgttctatatccctatttctactattttaaatgtagttttcatgctccactcaagaagccctcctgatggtccaatgacccgtgcatagccttagacatgttagtatgaattagtgaccttgagcctatcctgcattcataggcacaggaagcattgtcttgtgtctcctcttgagtattccaaaattccttatgtatttgttaatacagtcaacagggattcattctgcttatatacatactagttttgtgccagctaaatttcctaaaaactttaaagctttaacgtgatttgatatctcttatagattaatgattctttacagcttttcttggtgaatactatccaaacctatttgttttgatgattaccagagtaaaagctcaaggatcagaggaaatttagttgtttttctagagttcagtctacatgttataatatttaatttaaccttgtccaagtatcatccttagtctcttattttgaacaaaaaacccaacctttttgcctatttcttaaaatatgatgataactcatttcagggaatgttgaataggttaatgaattaaatatcataaaggatcaaggcagtgtatactgcttctaggtttaatagtatccttcatcattaggttgaaccttgaactgcagtattttctggtagatgtcaaatcatggtttgagggttcctgagaccttttcaaggaagttcacacagtcagaaatcatgctttgttaaaatatccacccaaaatggaacacagatcaatggattttgatataatcttgtatgaaaatttcactgatgttgtttcagattccacattgaaactaacctttaaggaactattcagtgttatttttcagtatagtatcaaagattcatatctacaattatctgaaatgaccattaaaatattcttcccctttcccaacaacatatctatatgagatgagattttctctatgtacttgaagaaaaacatagcaccacacgtagcaatgaaaatccagcagtcttctattaagtgtgacagtagtcttgcaaaaatgttaaacagtgccactcttctcactaaggatttttgtttggggaaatattgtttcataaacagttttcatattgtttatgttaatatgcaatcacttatttttaaatgattttaaaacatttgttttaatttttaatttaaactaatttaatattagttttaatttttaacttaaataatttaattttagttttaatttccaatacagtagcaataactgtaactcacataaacaaatgctctttgggatccttcatactttttaagaatgaaaaggagttctgagatccagaagctgagaactgctggtctgttctcttctatacacgctttggaggttaatgaagaaagaagacattacattatttgtattagtgttactgaatattattttgaggaaggagtgttctattcaaataggaaaaatgattcttgctcaggttaattttttaaactgacagaaatgagtaatggctgtgaggtgtgtgttgtctttatttcagtctgtgggcattcagtgagagtggtgacgaaagtcatctgttaataatttccagtgaatggattgtctgagcaccaaattgtaaagtaaattatgacaaagctaaatgtaaagcccttagaatggacgccggacctagttgtgtcaggtggattagaactcccctgtctgcttggacatcaacaaaaccgctctgagcctcagtttcttcattttaaagtgattaagttgaactaatcattttgctgatcactaatgtgccccaagagctgccagtgtaatttcctttgaagaatcaaaatagagtatcctttaacatacttgctaatttagtttcaagtattttgtatactcaagtctagcttcatggttttcagggtagtctggggagaaaaatatcatttccatttaccattttaaagtaaaaatgaggaggggcgatctatgattttacttgaaaagaggagcagttgtgtttttttaaaaccagatttaaagaaaaaataaactctgaaacttactatgaattccttgttcttcttatttatacaattcctcatggaaacagggcatttctgttgacataacactggctgtttatggcgatagtcatagtcactttgatagcatcataacacagggctaacattgacttagacttttaaatgtaaagtttactatttcaaagggcatattctggtaggttacaagaacagtaattaggatttatcttaatatgtgctgattttttttcacgatagaatgaaacagtttagtaaataacctatatttattcttttatttttcaattgcccctgaagtttccttgaaactcacattatatgacaaaccaaacatcagaattcggggagtttgtgacaaagtttgcccttttactaaactttcaatataaacagttgagaaggaaatatttccatgtaatgcaatgtctgaaagaatggtagggtgtgtgtctgagagagagagagtgtattggtgcttactctaatacataaatccattacagcattgcttaggtcatttgggaatgaaaacatgtaactttcttttacttattatttgtctcataatattttgattttgaaattgctaatgtacctagaatttcaccaggtaaatattttaaatatttttgtaaattattttaaaatgagagttgtttctcctgatattcatttttcattcgcttatatttctgggaagagtggtgataataaaaaaattaagtgttttataatacacaaatcactatgtacagtgtacttttgtgagtttcatttttaaacatcacaaatatcgtaggtttatatgtcagtatgtctgcctcttatcatctaaaatattggtttattatttacatcatactttaaaaatgatgctgagataaaagccatggtttcagttagataacctcaaattattccacttaatgcaattttcataccggtgacatactacggacttagacttttgaatgtaaagttcttactatggagatattacttatagatttgatattccatgttgccttttgcaatattgaaattctaggtgtgtctgaccttttctgtccttggaatgttacagtaatagcagatgttatattgatcaccactaatttaggagcaacactttgcttctcttcatactttgatgtcattatgtttttctgcaaagtagtacttttttcttcactttcagctgttgctttagttttgtactgttcatttgctgataaaaatatacccccactgctaaataatatatcattttgtttcgtttactaaattcaaattgagagaaaaatattagcttcttgattacatttaaatatagccattaacttggatatctttgatgacattccaacatttattaatgaaaaccgaggaaaaataaaagcatgttaaatggatagcgtcttcattttaaacattagggtctctggttttaaacttgtgaagtataggatttgtttttagttttaagagttttattttgttccttatatagtaaggtggtgatgaagttaaaatgtaattacatataagcacttgttaatttatgctctagaaacttctggatttatgattgttagtggtatggctaaggccaaaatttttatgtagaaaagtggtggaaattgtttgtattttgtgctagaaatagaaaactgtagtttaaggaaggaaacaggacaaaaaaaagtaatttgaatgcttaaaaagttaataccttagggagggagtatgagataatagctggccatctggattcataactgtggctatgacttaatttcatttctgatgaatacttcattggtatgtaacgaatattcaccttatatattaggagtttttgagataaatatatgaaaactctgatatgaaactgaaatttggctcgtaagtggcaaaattgactttagatattctggcagggagaggttatatgggcaagtcttggaaaatggggaggtgggggatgatcagagttggtatttacacttagcattgaaaatcttgcagggagtgggtagtgggtacttactggaggagggagctctgtgagcaaaatcctggagatggggagaaaacactgagtgtggttgagccgcgtggtgggctgtgatgtcggggttgggggtgagaaaacctggaagaggctagttggaactagaagggagttgaatttgaaatttacactaagaaatttgtacttaacttggtaggtagtgagttgttatggaaatattggagcaggacatggcaggagaggaagtgcacttggggaaaccttattgggcagtgtgtttgtagggtggataggagtataaagagccttgttaagaaattatttcagctgtgtagaaggatgagagctaggctttctggagtaaagatgttgggggtaatagaaggggacaggtttgagatattacagaaaaagcctatgtaagcgtctatcttttgtataaaaattgattttgaaataatcacaaatttacaaaaaagaaagtatattatagagaactcctagcatcaaggacattcacttacataatgagaatataaccattaaaatccagaaattagtatgggtaagttactggcatctactcttttgctgtttgtcccaataatgccttttatagcaaaaggatccagttcagaattatgtattgtgcttagttgtcatgtctctttagtctgggatagttcctcagtcttttctagatttcatgacttgatactgcttttgaaaattaaagggcagttatttggtagaaagtctttccattgggttttctggtatgtttcctcatgattagattcaacagatgtacctttggcaggaatatcatggtctccccaaccttaacatcagcttttgtaccactgtctcccgctggaatggaatgataatgtaacagaaagacagaagggcaggattctactcccagctctgttttgtgcattcttctcattgcatcctgtcaggtggcatgtgatttctgtttgggttattactatacttagaccacttgattcaggtgctgtttgcagggtttctccatgataaagttactcttttccttttgctattagaatatattttgtggaaggtactttgaaactgtgtaagcaccccattcttcatcagactttgtttattcagatatttatgtatatcagcatggcgtcattgttttttgttttgtgaagtgagttacgtacatactgttactgtcctaatttttgatggtcagaatattcctgattaagccaatggaagcccattgagagtggtttctgtgtccctttgccttgtccctatcattccttgagcacatccttgctttaggcccatcttgtacttttcctgacccagatctggaattggccatttcttcaaggagggttcccatccctgaagacacttttcctctttctgattacagtctaatgccacattctgggtcatagggacaccccccctttctatggctgccctccttatcccaccgaggcacagactcccgtgctgggctgtcctcaccctgctggggttcggacaccctccactagaccacacaaacacacaggtgccctcctgtctctgcttgactctgaccttccacatcaggtttctgagccacccttgggcttgatagacccaactataagccaccacagttggccaccccctttcttcactgtggatacctactttgctgtgtcttatgtaatgattttaggactaaattgttaaggaagaggaaggggaggagttgatatttgagtagaaatagtaaagtatgtggaaaatcggcaaaaacatcatgttatgagcttaactcccatggataatggtgagtaagagaaatgaagagatcagccaggcacagtgtaatcccagccttttgggtggccaaggtaggcacatcacttgaggccaggagtttgagaccagcctggccaacatggtgaaaccccatctctactaaaaatacaaaaattagcagggcatggtgatttgtgtctgtaatcctagctactcaggaggctgagacgcaagaatcgcttgaacgtgggaggtggacgttgcagtgaaccgagaccgtgtactacacttcagcctgggtgacagagcgagattctctctcaaaaaaaaaaaagaaaaagaaaaagaaatgaagaggtcaataataggtttggagcagaagtactgttactttggctacatgagttttaagtgccagacctacctatgattggaaacattcttcatataggtggcgatgttggtctggaggtcagggaggcctcttcatagaaattgcaattgagggagtccctgtggatgctgttagactggtgcaaaagtaattgtggtttttgctgttaaaagtaatattacccagggagggaatgtatgtagtgactcaagtacagtttaaagtgcattttgttaggaacttggaggaatagtgccccactgagaagatgaacaacgcatcctaatgaaggagacagaattatgtagagaaccaagatcgtgcttaagtcatagatgccaaagggaagaatcaggtagtcttagaatttccagtagaagggctccaagactatctagaaatctgacccactatgggcatggatactgaaactaatgcccagagaaacagcatggcttctccagtatcatacaaagtagctagtaacacagctgggaatagaatcctgcctttttgtctttgttaccttatccttttcttccagtgggagatagtggttttctaccagagggttgggaagaccaggaatagaacctaagagccattgacagatgggtgctggtgattttcaagaagggattggattggattgtgattggctaaggagtaaatgaacattgaagaggagaacctggggcatggggtggaggcacaatgcttactcttgggagtatatttgctttgtcatctgttttggtgacagcaaaagtggttaaatggaggagatggtagcgcaaagaaatggcaggttcagagtaaggattttgtttggcaggtgaaatatgaagagggcaatggacttgtgctgagactgaaaatgtgagagagacaagaggattgatgaggcagtgtcctgggaaggtgagaatagaaatgagactgcagtcagcctcagagttaaatatttaactgtgagagttttggcacttgctggtgactgccgtcactattttacagatatgaaaactgagacggagacagtattcgtgatttgcctaaggccctatagtgaaggcaaatgaagaagcaggtatttgagatagagaagaagaaagcagactatcctaaataataggcagccagatggatcttttaaaaacgtaaatcagattatgtggctgatagtttaaagccctctggtggcttctcattgcaagcagcagaaagtaaaataatttagggtctgtaagacactaaattaccaggcccctgattgctatatttagtatctgttcctccttgctcattccccacactgacctttctgtggtttccacaaaccaagcccccttccttttggggtcctctgtacttactggtgcctctgccaagaaggctatgcctcctgattttggtttcctgcctctttcttgtcacttaggattagttcaaatgtcaccctcccagagaggccttccttgatcttcttattgaaagtggtcatcccctgccttctaacacatcaccttctttgtctctcttcatagcagtacctgtcagaatgatctttctttacttcatttctgctagttagcatgtaagcctcctgagagaaggacctcatctggcctgttacttgtacattttccatacctgaaacagtgccaggtctgttgttcatgttcagtaaatattgagagaatgaatggatggattgactagcagagggggtgggtatatatctggcatgactaaatattggtgattatgtaatattaataaaattattaaatgacagagttctactgagttcagcaaaaaaaattgttttgacttctgtcagcatatttttagaattttccacaaaataattaacaaatactgttcttcctttttctcatctcagtataatacagtagttggtaatgatatattccaagataattgatgacttacactcttagtctgcgcaatgagattacttatttttaattcttactataaaattcactctttttggtgttcagttctacatgttttgtgaaatgtgtagtcttgtaaccaccacccaattgagatgcagaagagttctatcattcactaaaattctcttggtcaacccttttcctcactcccaaaccgtagtgaccactgtatatgccctattggtataattttgttttttttttttctatgttgtctataaactctatgtagcctttgattcttgcttctttcactcagtataatgcacttgagattcatccatattattgcttatttcagtagtttctgtttattgctgagtactattccatttatggctatatcacattttattcatccatttacctgttggtagacatttggcttgtttccagttttggctactacagttaaagccaatataaatatttacatacaaatatctgcatagacatatggttttttttgttcagtaaaaacctaggagtggaatcattagaatatacaataggggtaatttcaatttttcagagactatcaaattgttttacaaagtgtttgtaccattttaatattcccatcagcagtgtattagaggcccagttcattacatcctttccaacacttgatagtctttttaagcttaggcattatagtacatgtgtagggatatctcattgtggtttaaattggcatttcctaatatcttaaagacaccaaacatcttctcatgtgcttatttgccattcatatgcctccctttcatgcctgcttactcttgcccatttttattgtgtgtttttcatctttttgagttctgttatcaatgtaccttattgtaaactttttgatagaagacctagaactaagagtacaatagatatttaaaattctgtattggtaggctgggcgtggtggctcacgcctataatcctagcactttgggaggcctaggtgggcagattttctgaggtcaggagtttgagaccagtttggccaacatggtgaaaccccgtctctaccaaaaatacaaacaaatattagccaggcgtagtggcgtgcaactgtaatcccagctacttgggaggctgaggcaggggaaggggaattgcttgaactagggaagtggaggttgcagtgagctgagatcgtgccactgcactcgagcctgggtgacagagactctgtttcaaaaataataataataataggcaattttcaaattatttagtccccactctgtccttaatgtgggtgaacaaaaaaatgaatatgaaacaaaccaaatgtccccactgtattcccatctagttggggaagatagctcacatgagtgtatacagcttttttccccccgccaattatgtgtttgattgtgtgatggagataaaagttgtcaccaaagattagagaaggaagagttccatgtgggctagaatagtcaaggagaccttcatacaggaggtgaagatttcagtagatgtttgaagattggtagtacttgaggggaagtagggagagtattcaaggaataagtaatagcacaagtcaagtgctaggcaggacaaatgaaacttgcctggatgggtttaatggtagttggggaaaactagattatagacattggtgaatgctgaaatgaagttttgggcactgttaatatagcacattaaactttttttttttttaattcaggaatgacataaaagggggtagaaaggttaatctggtaagcgaaggagaaaataaggattgagacaaaagcacagtgtagaggctgtcatattggtaatttaggcagataggagcccaactggttgggatggtgagcgagaggtaaatactagagacaatttaaaggaagaaatcattgaatacaggttattggacccaaaacctgttccttttccactacatgactaaaccatgtatgttaacagcaccacaaaaagtagattgccaaggagtataggaaagaaaaacacaggagtttataggaacaaggagaaactttaagcagagttatggctctaatgtaagagaagaggagcagaatagttttgtttgaatgaaggtaaaacttgatgatttcagtaccaaaatggagtaccttttattagactacagaaaaaaatacccccaggaaatggaaacaggaagagccaactactggtttggcagagttggaaagcaaactggtgaaagattatgtaaatgaattagaaatagtgacatatggattttgatatgcatacaagatctaggcttgtttggaagtctattaattgtgtcctcaagtaactggtgtttgaattcacagtactctttccagaagtagaaatgtgcttattttcttccatcacatggtgaagtttgtatttacttaaaaaatattttttcgatacgtttgaaattctagatgcaaagtttcagggtatagaaatggaattgggagtagatattctttagtttatgccaatttggattctcagtatttttttttgaaatggaaattatatcctgagaggcttttgttcttggaaatttgaggtatgactaaagaatttatgatcatatgatacaaaggtgtttttttttttcctcaattcctctgtcattttcatacccaatctggttaagtatacatgtgagctattcccctgaaacttctaaaagcattctgggctttctatatgtggtagaaatgataatttcattgacatataccctgtattttggacttggttgctatgtgtaaggtgaaaaatagcatttttccccctcttaagtactgttttttagggaactgaaaaaattaatggattcctagagtagaggaaggaggagttataagcatagcaacctttcattgtgaaaacctaaagctcctacatttgtatgacttctgaaacattcagatccatgggtggccactggatgtctattagcaaatacctctatttttgagctaattttcatttaacaagcaaaagatttttatgagagagtataatttcatgaactgtgcatttcatgaactgtgcattttttgaagactgaatttgttgccagtacctgagaatggaagaggtaaagaatagaattctgtgaacatggcctagcctctgtgatttcataatgctgaagtatgcttttttaaaaagttaaattcttgccaattttactgtagcgggaataaatacatctagtattctgagagttttaatgaaactagacataaaacaagttaaaattaatggggaaaatggctagatgtccatgactgtcagagtcagtacattgtcagtatcctccagaaatgtcactgatattaaccaagctgagttatttccaggcgttgaatccatgaagaatgataaatgttttctcatcatacttattcttagaatgttgtgatacttttgatatttcagttactcgtctttaaaaggggagtgcccttccctgggccttgcctaagagaagaaagaaagactatattaagacagaaaacatggacattttaaagagacgaatacactgctatgtgaaataccagttctactcagtaaactccctgtaacctataacaaacaacagtgcacattaaaagcacttaatccaaaaagagttctgaagatggatggtggtgatggttgtacaacagtgtgaaagtgcttaatgccacttaacttaatggtgaatatggcaaattttatgtatattttattataaaaaaggtagttgagtcctaaaaatagggaggtgctacattgtctaataagtatagtgtcatatatgtgctctgttcagtactgattttctttcagcaagcatttatataaacacttgacttggtcaaagcctagtcctgggtgtattagtctgttcttgtattgctgtaaagaaatatctgaaactaggtaatctataaagaaaggtaattggctcgtacttctgcaggctgtacaggaagcatggaggcatctgctcggcttctgaggaggcctcaggaaacttgcagccatggtggaaggtgaaaggggagccaggcattttacatggttggagcaggagcaagagaaggagtggggagctgctacacacttttgaataaccagatctcatgagaaccctatcacaagacagcagcaagggaatggtgctaaaccattcatgaaggattcacccctgtgattcaatcccctcccaccaggctcccatctccaacattggggattacagtttgacatgaggtttgggtggggacagagatccaaactatgtcactgggtatgtggtcagagtggaaaatgaggaagtcctcacttttaggaacacccaatctagataacattcaagatccggttacaaagtaggttgtggtaggtgttattctggaggtaccaaataatgttttgagaacatagggagggaacagttagaaattaaatactaatttcgttaataaaattatgtgatagttataagtgaatgtaatatgattagtcagtactcttggtttgcaaacagcacaaggacccgtctcatattagcttaaagaaaatagaatctcttggcttaaacaaatgggaattcaggaagtacacctcaggcttggttagatcctaggtttcgaatggtgtcatcctatagtttctttgtctgcatctactagggctttactttttttattcagttatattttctggccagcgtcactctgggcttttattttcattcgttgttcaggttaaaaggaataacctttctcgacagattctgattgatctggcttgggtcactcatccagccttaagtaggggtgttgcttgtgtgctcacgtgagtggacgtgtatgcatgtaggtggtgggggtttggtctcacccaaccccatgtactaagaacacaggaagatgtgtcttcaaagggtctggccaaacaaaaactgtaccctacatcagtttcaaaaactgatcatacagtcattgattaattattccctatttaaataggttggtcacattgcttttctaagcattatcattagtaagacttaattattattgaaatgaactgtctggtaatattgtgagctggtggagaacagaaaattaatgattggaaagggcaaaagcaacatgtttttgggaggaaggatctgatagtttcttttacaaagtacatttacagatgctttaataatgagaaaaattaatggtaatcagaatgttttccaaaacagtacactgcagattgatcatcagtcactgatatgtaaagaatgttgccattaatattattctaaaaagctcattaaattggtcccacgaataaatatggctctagactatccagctcattatcattatccacctaagagtacgtaagaagtattttatatcatgtcttctttggccttttcactgagggcctgtgccattctcgatgcaaataatcttttctgaatatgggagaattactaacaaatttatacctgctcaccaggacgctatacatacttgcacatgtaattttgcttatagcttcagaagattcgtgggcccttccttcgccaaccatttcatgaacccatgagccccagattaagaactctttctcttggttgttgttaaaatataactacgtagcaggaagaggaccattgtgatccactaccaatagaacatttatagttgaaaatgcaatttgagttgtttgttcaccagtgatgctatgttatgcatttgtttacatctcataacatgtggtaaatatttatgcaagatggctagccagacaaaaagaaaaaaaaaaaggaaaaacaaccgtgaaatagagaatgcagggtgacccatgtaaacaggctagagatacatttgaaaaagatgagggttaaagagtgtgtagatgttggcaggtaaagagatagcatcctctagggaggatattatcaggagtcagagtaatcttggtaaatgggagaatatgtaagaaatgaacatgtagaagagtggaaagccagcttttaggtcatacttccacttgctcatcatatggccttgagcaagttacctatcctctctaagaatgagtttccttccacctctgtaaaatagtgacactaacagtccttcctcctatgctattgggaaattttctgagctaatctatgtaaagtactggcatgtagagagtgctcaatacaaatcttagttcttattattgttgattgttattagtttcaattaaaattgaaatagaggaataggaacaaataggaactacaatgggtaaataattactcatatgagagtatgacctaagagattccattttgaaatgaattaacaatgtagtattaataaattcaacctctaacattattgtagagagaggaaattcttctagttctttgtgagaacttaattgagaactgtattctctgaacttcaaaaatagagattatcatgaagatatcttagtgatttttaaactctttttttagagcaatacaaatgaagattaacatttacatatatcacatgctccatggtggtttgattgaaaagcattgtgtgggtatgtgtgtgtgggcagtaaagcaaatagcacaagttttgtttttgtgatattcataaaaatcaatactcagcatagaaatatgactcagtaagaattgcttattatggactataacatagataagataggctgcacagtgatgtactgtgatggttttcatctccgcctcttttctcacttgtgaacaccatcagaatgtaaacgagagtggctttattataggaagaatcatggacccttcctgtgtttctgttttaacagtatgtcattcacaaacatcaatattattaacaaattacttggcatacaactcaaaactgatcatgccctgttgtctagtgttctgattatagggacctgtgctttagaggaaagcctgagaatccagtaaaaatgtcagaaatctctccctcttccccacacattaaacgtcactaaatatataatgctattcaaatataagcactgttaagcaggtgattgcaaaatatatagtatcttctttggacaacagaaatgaaaacaaaagaaaccctgttagggatttaaatcagctatgaaaaatctgctcattttatattattgttaaacactgggctggaattattgttttgggaaaaggcccatgagagtttttgctctgtgggtttttaaaggtaagaataaatttcgtgtttgagatgtttttgatgtgcctgtaaccagaatagaagtgtcttagattataactttctctcagattgagtaattctgttgtaataagtcagcatatgttgccatctagtctaaaaactgcatgaagataaaaacatattatataaaaccatctatagtatcaagtctttacaatctcactatgcttaagatataatgccaacaccatacactagataatttccagatggtttaaagagaacctcaattgagaaaaacactgagttgaacacatatctgactcttggatagagaagtcattataagtctttataagaagagagcggtagaaggaagtacgtgtgtgcacgcatgcatacacacatgcatacatacactgaacattttgattatataaaaattcaaaattcccatatgccaaacaaaattaagacaaaatttgggaaatgatgagtaggttgatatctccataataagagctaatacttatcaataagaagaccatgaagacttccaagagaggagggaaaaaacaaggaaaagacatgaacaggcagctcatagaaaaacaaatacaggccaggtgcggtggctcacgcctgtaatcccagcactttgcgaggcggaggcgggtggatcacctgaggtcagcagttcgagaccagcctggccaacatggtgaaaccccgtctctactaaaaatacaaaaaattagctgggcatggtggcaggcacctgttatcccagctactcaggaggctgaggcaggagaatcacttgaacccaggagatagaggttgcagtgagccaagattgtgccattgcactccagcctgggcaacaagagcaaaacttcatctcaaaaaaaaagaaaaaaaaagcaaatacatatggagtgtatgaacttctaaactgtttaatcatgctactaaatagagaaatagaagtgaaagcaacaatttggtatcattttaaattggattttcagaaaaagcaaatggtggatagggagcatagagaccatcgctcttggatggcatccagtggagagtagaaagagacacaagtaatttggcagcatgcactatcagaagtagtgtaacttgattccagagcatggactcttcagccaggtgtcctcagttttaccactttatcagctgtgtgatcttaggcaaattatttattaaccttttggtgcctcagtgttctcatctgtaaaatggagatgatagaatgtaccaaacagtattgttataaggactgagttagttagaatatgtaaagtgcttagaaaagtgcttgtcccatagtaagtcctacataaatgtatttgctatattattattatcattgtctttatatacctcaaaagatccagtttctaggagtgtgtcatcaggaagttgttatacatatggaaaaagatttatgtatgatgatgttaatttagcataatttacaaaaatttaaataacttttttcccagtgaattggcgattagccaaatcttggtaaacttatttttttcttattatgatataaaaatgcagctatgtctatgaagaaaatttataggaaatcattacaatttattttttatatttaatattatgatatgcagctctatagacagaatttgtgtctgctcagttacgtatgtgtatattttattctcagtgggaagaaatgcatgtatttttttcttagtggaagaaaatgcctcgaaatcagtggtgtttgtctatgagtaataggattacttgctttgtttatttttctttttgtatttaccaaattttctacaatgagaatgtattgtttctaggacgaaaaattattaaaagagcagcagtaatgattttatttgagagtgtaataaatctctcacatgtaagaacaagatcatctttgcctccagatggcactaccattttcacagagaagtagagagttctgggctgatgagcattttgttcagttaggatctaggcttcatggatacatttgtcttgcttcctaaaccagccctagacagacgggtggagggaggcatggaccctgcacatgccccctgagaatgctgctttttttcttgcaggtttttgcctgcttctagattctttaaagttatggggccatttgttgtaacatctattaaaaccacttgagagcaaatgaaattgtttgtttataataatctgaaaagcaagcatgatgaataaaatacatttttcatagtatagtttatttcctaagcgaatagagcaactttaaagagctattagggcagaataaaaatactacataaaaatcattatttctaacatttatttctcctctatattaatgatctttcctcctgctccatcattctatcaggcctgaaatttgactccttcagttcctgcgatcctgtaagaatggttctttcaggttcttaggttagatcgacaatcctttgctttttcttttcttttctgtttattattttaagttgcactgttcttacataatgatcctttcacttagtgagataaggcaaagttaactgagtaaataggaggagttttatttattaattggtattaggtgaatcactggaaattttgagcctaacagatttttctgtaggcaaatcagttgcaaaatattttaaagatttgcatttatgcatatcatgaaaaactgttttaaaaatacttttgttaataaccctaatactgttaataacttcatggtttgtaattggcctgctgactgaatattcatggagtctctggacatggaaatagtgacttatctagatttacatttatgatttattcagctgttattgctaagtagtatttttatagtaaaaactaaatattttataaggcaaaaggtaaaggaaaaataattatcacataaatttcctttcagaagctctcacgtctaacatcagtataagtgacaaattattttccacaagtctttaatgtatttaagtctgaccaactggtaataatttttgagtattttttttgaaaaataacattaaggtcaaaatgcaatttatttgagatcagtaacaatcaaggtggattatagttatctactggaaagttgaattagttgaactgaacagaggccatatcatctagacagtggttaggaattttcatatgatgccttatttatctctttattatttttaaattaattaacaaaagcaaaattatagtactcataatttgctccccagagttaacaaatgttaatttttcattgggttcagatctttctttaaatgagagacagaatattacaaagttcaaatcagatttggatcccttccccacccttttcacttcctccctgtctttgcggaagcagtccaagtcaagaatgtcatctgtattttctgcccatgtttttatcctgcatatataggtgtatgcgtatatttagcaattttacataaatggaatcttacccttgcaaaacatctaatgatttttgagctttatgtgtgatgatacatttagatgtagtttattttactgtaattgcctgatagtattctatcgcttatctggttccctattaatggacatttagattgtttccagttttattgctgataaaagtagtgctgcagagacaaattttgtaaatgtctgcttatacccaagagcaaagatttctctaggatatataattagaagtagaatttctgtgtaatgaagaaatgtatacatcttgcattttataaactttgcataatgcctgccagtagccagtatgtttgtactagtttacgttctcatcagtatgtgtaaggtactgatttgccacatccttgcttacgctttgtattgtgggtaggaagtagtgtatcatttgtaatttaaatgtgaatctcctcattacaggaaaattgggcatattttcataggtttgtcagactgagtttcctcttctataaattgctgttcatatcctatttacctatattacttgtgagttaatgtctgtttattgatttgtcaaaggtattaatctgcgcattaaacttttggttatgtgagttgaaaatatgctctcccagtctactgcttgtgctttaactttgttataatgttctttttcatacagatgctttaaattttgatgtcatcaaaatttcaatttttactgcttaaggtttgtgctttatatcccttgcctaagaaacccctctctactctaagttcatgaaggcatttttcaatgtattcttacagctgtatttctatttttctttaagtctcaaagcttttcatgtagtagtggataaaagaatttattttttggaaacatagtagttactttaggaaatgatgcatttctaccaccatcctctaaaataatcctcacagtgatagggatgattccctatgatatttaagaggctaagaacagaatacagttataccctgtgacttacgaagagtgagtgctatatagctatttagaagctttcaataaacactaggtaaaatacagaagttggggctgtttatttcttatttggttttgaggttcaaatatttatgaaaatattatgcttgtgtggaaagataacataggggacgcttctagttttgatcagttattcattgcagattgagattgctgtcttaaacttcttttgaaaataaatacaaggccacacagactggaaaagctcaagtgatatgtatttctgctctaaactctcaacagtttgtcacctggggtgtgatgggacactcagtcatccttttgggatgaagcataactaaggggtgtgtgtgtgtgtgtgtgtgcgcacatgtgcacctgtgtatgcacgtatgtgcatattcacagtgttgtggtctgggtcagagagggagatttcagtcacagattaaaagataaaaattatgtgcttttagaaaatataaataagtaaaagaatgtaagcctagaatgtgctgacagttgagtttttgaaaatacatttcaagttgccattataagactcttagatgaagctaatttttgttcctaataaaggaaggagcatttttttttactccttctccacatttctcttgtttctgcatctctcttccaattaaattaccaatagacagtgcctgcattttattattgaaaggctaaatctgaatctccaaactgtgaatacttagccaaaaatctagttagaattccagcttgatctttttttacttcacttatgtattctaatatagtttcagtcttctgaaatttaaccaattttcactgtaattttaggaataagtcagtcccaggaaaataagtgattaaggggatacattgctttcctaacagtaagaatggcacagctccacccacccctccctgcaaagaatgaaagccacccactgatgtctgcagcggaggttgtgtgcagcaatggtcagtgctgccttggatgtttattgtgttcaccgagtctcagtcgtgatgtgctttccaggcattagtccctatggcgaccccaggagacaggtgtgataaccctgctttgctgatgaggaaacttacacttttgagagggtgagtagcttggccaggatgacacaattagtaaatgcaacaactggatgtgttatagcccagctctgaccaacccggaaaccctcttttttaaattgatgctgtctccctaaaatgtgcagcgttaagttttataagtggattttcttgttctttacttgggaagaatgtggaaggagaggaagaggaggcctggagttccttcatcttggtatgtgttgcagaggaagcaagataaaggaaaactatttattctagcaacactgaagtctaaattttgcctgcttagtagttaatcttagagcttgctctggttgtctatgcatatggcaccttacataagtatcttttgatgtgacattgtctgaagatgatgtgagtaggacgacactgtccagaaggtttaaggatagatctcaatagcattgtgttgaattaaaaagaaagaaaaaccagtgtcgagcaatatagaccttgtgatgccgtttatataaaaatctaaaaccacatagaatatgtccatttgtttatgtgtgcatataatggaagtataaaaatacagaacaaagatatcaagcaaaatttaattagtgcttgaccctggagagggagggacaggggaacaaacacattacccttgtctgtaatattttaattttattttgaaaaatatttgaattggatttggatttcattaaatgttaacatcttttaaatctaaatattaagtatatggatattttgttagatgctatattattgcctgtcctcttctgtattcgaaatttttccccaagtgacagcaacaacaaaatgtggttatagccaggatgatttgctaccaattgctgggccccaaaacaaaaatagtttggaacctagaactagtttctttgattctttgtttgggccagtggtgggtggtgggcgggtgggggacgggcagttgatgcaaccagccaaaatgaaagacattaagctcttgctacaactaaaaaatgtgtagttggaatatagcaagaaactgcaatttaggtctcccaaattgtataagatgacattgagttgaaggtcggagtactgaagattatctaaggtttcctcgtaaggtttagtttggcttatgtctttggtgactatacgtgttctgtgtatctgaaccctgacagtagtctgtaaagcatatttttgtcactactcctggccaaatgatgtgtgatactcttgtactgtgtgggcacatgaattatagcattattacctcaattattttaggtaagaaagaaatctgaatggccagtatacaaatactcactgcttggagtgaccttttttcacctctcagtctaagatgttcatgttaacttgcggataggtaagaaaaatacattcttttagggattctgcttctttgagttatagtgaaaggtccctggccgttgtacataggtcacaagacaccaggttgtattttaattttatttctgtattttaaactttgatttaagcttctgcagttaaactaggatgtagtgttaacagttccctgaattaagtctccataagtttgaagcccataaactactgttattgcttatctaaaggggaatatactgtgaactgaagatttgagaaaatctggatttgttaattcttggacgatggtgtagtttcttggagacttctctgtccattgcctcattttaatcacttgtattcaaaactttattattagataacttaagtactgtttcattcattgaaagcatagttaacttgacttggaatggtatgggtgagaagcagccagctggtttgagatgaactgagtttagatagcatttgattacaacttacatttcataacaatgggaaatttacatgtacatacaagattattagcatattttctaaaagttggacatggtttttgaatttaacaattcaaacattgaaaaataaacattgttttttaaaggtacctaattttttatgtgacgtacttaatagcttttatagaaaacatcatgtataatggtagttattggaatttatgtagtttaaaaaaacacagtttaaaggactttatagacattatgtcatttagattcatccttctcttgtgattttagggaaattatccaattttcaattatgtgtaggggaatttttagcgaagagaaataaagtatattttccttacattcctaaggaaaaatcactggttaaaaaacagaatttaggactgagttagtaaattacctactttgggacattgtaccgtgaacttatttgagatataatagttaaaaggacctgctaggcaaaaaatattttgcatgaagtttaaatatggatatattttcattttaatatattttcaataaacattttattatatgctcaattttcaaacaactaacttggaaattcttaataattggagataattttttaggtagctaattctttggaaaagaaaaataacatttctaatatgctttctgtcacctaaggaaaggtccatcagaaaaggtgaagtttaggtttaaaagttttgacaaagataacattatgacaagacagataaggcctaagtctagtggatgaagacttgggaacatgtgactatccttgaaggtggcaagtcatgggttatttaaattaggtgctgaatagttcatggctcaatttgataaggaaaaacaccaagaatttttagagacagaagagaaaatataaaaggctaataaacgtaagattttatctcaatatcaaagacataattaagacaataaaacctattccttgcttttcatattgacaaaatttttagaatagtttgcttttataaatgagaatgcacatattctcctaatgacagtctaaactgggatatcctttctggaaagccgtttggcaatatgctaggagccttgtttctttaccttttgacccaatatctccacttctaggaaacgatcctaggggaataatgagaaatttggacaaacatttacaacaattcattgcagtattagcaagacctagaaaacaacaactaataggagaattattcaacaaagtttggtatgttgctattatttaggactagtagatgttttaaatatttctaataactttcaagatacaggaaaatgctgtttcttataatactgagtgaaaaaaaccaggatatagaacaatatataagcatgatctcagtacttcttatatatgcagaaatacacagtcttaaatgtattaatagatcaattagatgaaatacactaaatatttctctgaatggtgatattatgggttatttcattttttcttaacacttttattttctgttttctactgtctgttttcataaatagataattaaatagttaaaatggttgcctattggtaaagatacctgttgatcatcaagaaatgtggttcagcattttttgtaaaagaaagtatctttgaattataaggttttagtggttgactagatcatttcaatgagtttaaaaacctgagtttgatgctgtggagtataaagaaacagaatgatctctgccttccaggtatataaaacttggtgggggaatcaagataaaactctactgaaaatcctacaaataaaatatctgaattttagagaacctacctctatagtcaccttaaaatagaggatggaaatctagtttatgttcctagcacatatttttgttttttatcagttacctgataactggctagcactgatcaatataattaattattttgatcattttctctaattcgttgaggcctggcttggcccctctgtgacatgtaacacccctttcctctgttttgatgaaaacttgaaacacattcacttagaggtagtggtcccctgctagttcaaatgtgatagctaataaagaacctttttattttgtagctaagggtattgattcagccacatgttgggttgcctcctgcttcagcacaatagccggaggaggcaggtgggagggagtgctcttctaagggtgtgtgtagtttctgcttttggtgtgctctgaaaatctaatctaaaaactgttgcttttttaacttccaggaaggttttactgagagcatgctaacaggttatcgggactttctttacgttaacttgctaatatatattattggaagaaaataatattagtgttcaaagtcaggattgaacatcattccagtagtaaatagtgatgggacaaggatattgatatgtgccattttacagtacttcaataagactaaaataattaaaagaactcctaactaatgtaaaaatggaatgatgaactaatttctttagaaggatgtattcctaatgaagggggggcctctgatagatttgagtgatttacattcatttagattcattatgtgcgtatgcttgcaaatgatattctagaactatgagaaaagctttttggcatacttggaagtcgactgaaatcctgtctcagtggtaatttatacagactttaacactgttttatttgaagaataagctgtttaatgaatggatcaataaaatttcacaaaagtaaaccaatcaaaactaattatatgtttgagaagcatgataaaattatttttatatgggaaaacacatgaaaaagatacatttttacaatcttataaaccacttacggccattgactctgattttaagactttctttagttgaataaaacaatcaagtgaaccctacatgtaacaggggtttctgttgttactagaccacatttctcctgtattataaatgccatcttcctaacaatctgtgactttgagtactgtgtagtgactggattgaaattacactgcttgggtttgaattctggctctggacagttgttagtattgatcttggaaaagttattaatttctataagcctcagtttctccatttgtaataatatgcttaatttactcggtagttgtgaagagtaaatgaataatacccacagatacatttagcgcagtgcctggcacttctgtaaacgttaactctttgcaaatggttgtcatgatttaattaagacatatttttaatacttgctgttacattttcttaggctaaaacatgtaagtccaataattacgcagcttaaattcacatctcactgaaactattgactgtcagactttaacactgatcctggactttgcgttttctaggccacacattctgatggttaagaaattgaaacagattttttcttaataattatcttggacagcaatgaattgttttatgttaacattcttagagtttagtatttgaaaactcctaaatgtaaatatttaggatcctatcagtcagattcttagttaaagcttttaccggcctcctatttctcttaggataaaaagaccagacttgtaatatggcctgcaagaccctggcctggctctgaggagctctttgtctcatctcttacctcctctctcacaacttagttccaagtgggcttaatttcttcaggttttccagcagtatgtatatactctcacttgtgggtagttttctctgcctggggtaattatctttccatacctcctaaccaccacaacgtccttgctcacgtctgcgtcctatcggctagaactccagggatcagcttaaactgctccatccagaaggcattccgaactctgaccttaaattccccttctctatacttaccactcttcatatttctccatcaaaatgtgtatatttttaatattgttattattagtactgctattttattattacttgtttaactctcctcccttctagaatgcatgcctcatgaagacagtgctgttaccctcttgttcactttttttgtttgtttgtttttttgttttgagacagtctccctctcttgcccagactggagtacagtggtgtgaccacaactcactacagcctcagtctcctgggctcaagcagtcctcctgcctcaggcttccaagtagctgggactgcaggaaggtaccattgcacctggctaaatttaaaaatttttttttaaaaacccaaaaccctttgcagagacagagtcatgctgtgctgcccaggctggtcttgaccgtctgacctcaagtgatccacctgcctctgcctcccaaacttctggaatgacaggtgtgagccactacgcctggttgactctccttactgagacttaggaagtctgagttggagaatagtggcaaggccagcaaggccagtgacactgcacctgtgcgtcagacagactctgagtcccccacagcagttcacctgccctttgcgtatgaagcagttacttccctttggagattttctctaacttcccctgagaggttacattttgtaaagtgctttgaaattccaaaggtctctcaagtttttatcagtataaagcactcaaacgtggctggaaataggccagttcttagtgtgggtaaaactcaggtataagtagttcaaggagtcttctttactccttgttgcagtggaatttttttcaacttggtaactttcaaaagtgaaatccttccctagggagaagcaaagtctttgtgcgttccctacaagtgtagtgtggatataacaagaggtgatgtggtcctggtggtggacaggtatgccttgaacctactgtccctttcctagtcccagcttgggaatgtgtgagaaagagatgtgtgtgtacacatgctgcacatctgcatagttggcaaaatatttgcaagatatctttacccttgagagttggagagaaaagggttatggctatgtccaatgctctttttgtgtagccctatggtgagactagtgtatctttctatacaaagacatataacatgtcaaattgtcattgttatgatctatttccatcgattggctcttctttaagaaaaataagtttattttggattttttggatgttatgtgagcagaagacaattttaacaccaaaatctttctagaaattaatcttcaagaatataaagtatttgaaatttaatagttcagtaactttgtatactgacataatttggtaaacatctaatacatgagtttggaaccatctaattctccacatgcattgaagtttataagctttgaagattctcctaaatttatgcttttatttctggttattttaagtcagttaaatttgattataattttttccttcaggtaacattctcagaggcaaatattacaaataaattgtgaatgtaaattaaaaacattacatagattttcatcattgccgaaagtatgcccctaagtacatttcctccttttttattgttttcttgtgctttgatattatgttttaaaatcattttatcattttgcttccaaaaaattcatcaagatccatgtttattagtttgaattttaatttctaaatgagatggtagatcataagtgctgggaagtgattgcttgaaattaacagagcattacactagcattatacttatgcttatgaggagacctaaaatattttgtttgcatttttgtgcacagataacgtgtccctgctctagactccccccaaaaaacaaacaacacaataaagactctggaaaccttagaatggtctttgacctgtaacaaaattttgactattagtgtaccacatttaattaataaatgtatttttattcttcttttgttccacatgtcataattcaagtttattcagatgaacacttcttttaagtgaatcctgttctaacaaaaaatattatctaatataaataatcagtgaataatttcagttttgaaatgtttttcaaactggagttttcagttattttatgcaggtgtgccaggccttaagcctgatctatgaaatgaaatgaagccaacttggacatgaatttttactttacaaaatagttccaaataaaaagcatcagaagagcagacttttaaactcagatacatctgagttcaaaatatgacttgattctctgtctgagcaaaatgtgtaacttatgacatgttagattccttatccaagaaatggggataatacctatcaaaaagaaaaggcaaataacatatgtaacatttgttgtggaaggtgaaactttacatatttaacaaattatcactgccatctctaggtatccaagttctcctagtatgtttaaaatagaaagtacataaatgggaacttgaaaacttttggtattacttccaaaaacataccttcatttaaaacataaactagttatcagaggaaatgtgaaaaagtgctcataatttttagaatcttgaacttctacactggtacttactttcctctttatattatttaggacatttaaaattgcaaattactgtgatcaaatctaacataagaaaaaggttgtcttaatattattgccttattttaaaatcagtatctggctctgcatagaaatgtattttctgaagcatgggagcaatctgtaaaaaatattcagaaataaaatcaagttacattatgtagagagggcaggcattgaaatagatatttttctccctgtcattagaaaatagaacatttccctaaacttgtatttttctatgggcttgatcaccttcctttcaacacttggctactttctaatggaaaatttccttttgaagccatgagggatttagtctgtaataaagatattacccagcaaatggaaagcagaccataacaaagtgtaaaaaattaagggctagtggaatagagagaactccttctttttccttttcagcatccaatatgtgtttggatctcaagtagtaatttattgaaacataaaattgaagctttatagtaatatgaggggaaatgtaaggattttatactgtagactatttttgtaatttcattttttaaattagactatttgggtaatacactttcatcaggtaatttaaacaattattttaagtgccttatagaatctgtgtttaaaaatgtgtatgaatgtgtatatgtatatatacacatacaaatatatatgcatatttgaaatacatagaattttatgtaaactaaaaagtttcctattgctcctcattacaaaaaaagacaccctcaaaaccaaaggaaccactattgtgtatcctttaagacttttctataaatttacttgtttacagcttgccattttaaatttaataatatattttggacttattttcatgtcaggtgggagtgtcttttaagcttgttttgctttccattgtatgtgtatgttttaatcttaatgctgaagacttttaaataaaattgaggcatttcttgcctcatataatatttattgaatgcctatcatttgctacataggtactagggatattgaaatgaagatattgaagttccttacctcaaggacttatatagcgattgttgtgttcatatacaaaaataatataaatatcgaagacatgttctaactgtgaatttagcaattcataccgaagaggagcccagtgactcttcatcagtctctataccagtccctgaagtatttcactcccagatactttgtgtgaaattatgtcttacagtaaacctgaaactcagtaaataccagcttgatttgaatataacaagacatatctgggtcagatatttcattatatcctctgcctacagtacagttgtagttgctgatgttttccttattaattattgagtgtctttggtattaagtgcttcaccttgattagcttctcctccttcccctacttccagtttttcctagttcagaataattactgaaacataatttgatctggcagtttattgctaagaattcaaagcctagaaggtaattgttatgtctgtctactgtccgtgaggcttgttactgtaatataacactgaccacaccgttgggctaagattaaaaacctgtacatggcctgacaccagagccccattgtggaacctacaatctgggtacttccatactgaagatcatgtaccacaatttttctgcttaatttagccctttaaagtatttacagttaccccataccatttaggacctacctcagactgtaacagagaccttacagtggcttaatcatgatttaggattatttggttttgactcatgaaaagctggttgctggcatgggtttagaagctcaagagcatcagggctgagtctttgtgatccctttggccttatcctcctggtcccaaacattaggagggaaaaaggcatggagaaaaggatggtgtctatttcaagaaatacaactttaggccgagcgtggtggctcacacctgtaatcccagcactttgggaggcagagatgagcaaatcacaaggtcaggagatcgagaccatcctggctaacgaggtgaaatcccgtctctactaaaaatacaaaaattagccgggcgtggtggcgggtgcctgcagtcccagctgctggggaggctgaggcaggagaatggcgtgaacccaggaggcagagcttgcagtgagcctagattgcgccactgcactccagcctgggcaacagagcaagactctgtctcaaaaaaaaaaaaaaaaaaaagagacaactttatcagaagtctttagtaagctcctgcttgcatcatttagaccaaaactgtgtgatatgaccacctctagcactgagggaagctgggaaatatagtgttttagcacattgccaccctgaacaaaacagaccttctgctagtagggagacaggagaatggatattctcctagcagcctctgccatgcttccgcatcagatggtaagcaccatgtgaggatgattccacatagtagatgcaatgaaagagagagatgtattttctcatctagttggttcacatggtgggtatactgtgagtctcaccagtgtgttgccaccatggtgattataatgcctacttggtgaatttgttgtgggaattaaatgaagtaatgtgtaaaacatctgaccagcacctggaacatagtgaatactcatggtgtttgatgttgttattagtagctcagtaaataatacttggtaggcaataaagtgtgatattagacattcacattaaatgtatacaatataattctatgtatttagggtatgcaacatgatgttatgggatggagattccccaaatcacagaatagaggaacccaaaattctgtgttaattgctaaagcaaatttatcttgtatttctacaccaaagcagtctctctctttttttttttttttttttttttttgagacggagtctcactcagtcgcccaggctggagtgcagtggcatggatctcagctcaccacaacctccgcctcccaggttcatgcagttctcctgcctattctcccgagtagctgggactacaggcatgcatcccaatgcctggctaatttttgtatttttagtagagatgggttttcactgtgttggctaggctggtctcgaactcctgaccttatgatccgcccgcctcagcctcccaaagtgctgggattataggtgtgagccaccatgcctggccacagtctttaaaaataatgtaaactctctatatatatatgtatgaaaatataagattggatctcttactctcttatggattgggaacaatctccaagagcaaaaaatcaaggctggctttctgactttgttaggttttaaacagagctaatgtctacttcccaagccacaactattagtatacattactgtaagtagaaggcagtctagagaacagtctaattgtgtttccaacccagctccccacttcatgtagatacactgctagctcagcccttgaaggtttttgaatttttgatatttgccttaagaatgtgaaaacagtagacctggacatttaatcaaatcccagactattgggctacaaagaattccttgatgcttgaaaaagcgtcagtttctgacaaatgccagtataattctcctttacacagagagacataaaacgttttaaattgtatggcttaaaatacaaagagtttcttgacaaattaagataagttgaaagaagctgcattctaaatcactgttaaatcaccgttcattgatgtttttggaagacattaaagtagaaaagtttatggtttgcatctgtattccaatagccacacagtgagctgtgccagatttacagttctaacctagtgtgtgttagcactcatatctgggttgattgtccatgggcttgagtaaagtaagctttttaggattattaatcaggaataaaaagccatggaaggatgcctaaaatattaatatctgtgattggtgagtttgtgtatatatgtatgtgtgtgtgtgtgtgtgtgtgtgtgtctgtatatatagaaactttgtcgatgatggagagtagtgtttgtttatgtaaggtgtataaattttttttgaaatatgctaatcttgaaaatttttattttccaaactaaggttaaaattattttattttctcttagtatttcattttgaaaattcgatatggataacccttccaggaattaaaagtttgccataatgaagatatttgttttatcattatgtagtgttttgaaaaattatgttcttattaattatatataatacactatatgtatgtcatttaatatgtagtgtattatatataattaatatagaaaaacaatgttaagtatttaaaagtatgtgaatgataatatagtaaattatgacagtattcagtggaatattatgttgccattttaatgcaatcatgacattcatgcaagtgtagagaatgtttactatatatggaagcagaatgcaatctctggagtctgagtacaagcaggcctactgagacagttaacacaaaggccagaggcaagaggccactgttttaagggatgcaaagcaatgctaaatggatggctgaagaatttaagttgggcagaatggtgagaaatgaccctggagggataaccaggacatagtttacaaagagtcttgtctgtgccatcctaaatatgcacttgttcacttttcctaaaatattcttccagtgtttttatgactgctttgcttcttcctcaggctatggctcaccaattactccttaagaggccttccccaaacacactctctgaacccctcgctctcattcaaacacaaacatgcgcatgcacatgtacacaatcgttactctttatctcactacccagggtacttcttttttagtgcattacaattggtaattattttgaatttcttaacttcttgtctctactagaatgtaagctccatgagggtaggggtaatctgttatgtttacagatttatatgtcttacatacggagcattcagtaaatgtctttgaataaattaatcaggagtttgaactctgtccccagcacctttctgtgctgtgtggtcttgggcaaattacttttgaatctgttttctcatttatgaatttgggatacttataccttagtttcttatctgagattataaaatgtgagttaaggtggtatacaaattcaagattattgtatagaaatacacatactacaaataaaattacaccccagtggtttcacagaagtgatattttatatatctacttggatactttaagggtacactgatcaaaagaatgtactgccctcaatttctcatacttacttgatttgcaaaagctgacctggagttaaaatattctaggttaacctgaacttgttagagaattaattatgcagcttttgtgagcaacacctgtagtgggttaagtagcatctcctaaaaagatatgatcacgtcctactggtatctgtgaatgtgaccttatttggaagtagggtttttgcacatgtaattaaattaagggtctcaggatgagggaatcctgaatttagaatgggctctaaatccaatagctggtgtctttataagagaaaggaaagggaaatttgagatagagaaacacaggggaaaccatatgacaatggaggcagagactgaagttaagccaaggaatgggaggagccagcagaaactggaagaggcaaggaaggtctcccccagagccttcagagggagtgtggctctgcagacaactggattttgaacttctggcctccagaactgtgtgagaataaatttctgttgtcttaagccactaaataaatgcgtgtatggtactttatgtcagccctgggaaatgaatacagtatcccagatattttaggtttattgaaaaccaaaagaagtttaggcgacagcttccatttttgagctctagctgtatgtatgatgagctgctcactctcagtttagagcagaagaactattcacatttataagaattccttcaattaaaaaattgaaataaggtgcttaggggattaggaaaaggaaaggagttttttgtattagaattgttaatgaattatgagaatgctatcaagtaaaatgaagaataacaataaggaaagactttttgttactttgtgtgtgtgtttgctaaaggtgtgataatacattttggcaggattcccgtctgagagattggtggctctgtgtattttatccacagcacagagattatctgactggccaaaggcctcatagttcttaggcactagagctagaattaaaacccaggactctggctccagacactttcctattttcactgcacaaggctgcctgaaggacagtcagccacgatgaaaggacagtcaagatgaaagcccatggctcacccaggtctacatcccaggcagaggccttggtgtcaggagtgaggccaccctccccctcagggttgctgggccctccctggtggtcagaacagcaggtcacggggaaatggtgggggctggtctttgctggccacatttcccatcatggggacccagaaaggatgttgagtgaaagcagctgttgtatataatccatggtgtataatgcctaagtagctatttacacttcaaatttcaatagggttcctctggcaaatttgatttttccagagaacatttgtacaagttaatgtttaatacttagtcttataatccatgaaaaagaagggttcttagatctttaaaaaaaaaatgagcaaaacatcaacttctataaatttagttgtcctttatatgcagaagtagggattggagagaaccaagttccctttggtaatatacttactgtgtaaagaaaagtttagtaagttaatgaaataattcaaaattgctttagaattattcagagtttattagagtgtaatgttttcagctaatcattttacttcatgaaatacattaaaatggtctgttgtgtgatttttaaatgaattaaggaactttataggaacctgttttcagggactcatacatttttgtccctatattattattcaggttgaaaaacatcccaagtcatggtatgaaggttgtgcttgtttttcatagtttaatgaaactcttctcctcagcttatttggttgactatagaaggaaaataaatatttattgcttttgcaattaaaacattcaagtaaagcttcagttacctttctaaagtctttgttaacaagaggtgctttgttataaaaagttgatggtaatttagacatgtacagaatggttggatataaatttttctcaaattgccttgaaattttaatggatgaagtgaagaaactttgccccagggaaaacacaactatttcaagttttattactcgtaagtactaacatatgaatttttagtctgtttatatatgaaatttatgtgctgctttatatttatgtgatgtatcatgaaatattgcatatgataggttcagtacaactttggtgttgggattattccagagagctgagcatttgcttaaaattcaagactattttgttttagacatttggaatagaaatctgtctaaaataaattgcccattttcctgtcttcttaaatagatggtactgaccaaaacctttccttgatgaatgatcacactatggtttattttaagctctctgggagcttagttgcttttgtaagcatagtggaatgccttgtcccaagtatagcttccacctctagctgcctgtaagtatactgagggcaggattaacatttttaaattcccggcacatccagcacaacacatggtcaatcattttacttgaatgaatgaaaccattatgacaaaatatggtgccccttaggatcagctgatatatttagtgttctttgccatcataataacaccagactgctgttactgctacctgctttggggctgttatcttgtctggcttgtatagctcaacataacataacataccttcttactctgtcatgagtttggaatatttcattgagtatggttcaatattatgtacaatgagagcaaataagctctaatagcctgacttggtatctgtgtatgaacacgtttagcacacacatttggtattatctgcttcaatcacagaagtctattttacttaatttttctgccatttgcttcagtccttttcttttgagaagtgcatctgttcaggttaggataacccttgtggtacagttgtaactatgactccgtgttgccgtgatccccaccttattgggaactttaactgatgccatgtttccagaacccagagtgaggattcatctagatggcttatctcattgctgccccaaaaaagtccatattctagaggatttaggggcagagccctaaatcacaagccataagagtaacatttctttgaagttgtatgttctttcttaaaaattaatgccaatttagagtttatacatactaattaatatttattttgatgtaaaacaatattttaagtaactagtgggaaaacatttcctctctccacacatacacacacgtgtgtatttaagtacatatcctatttttttttctactgttactctcacctcccccatcccaacacacacattggttacctatcattttaaaaactttgagaatgagagagaggtttatttccaacccaccaaatcctggactgtttcccccactacattctgcttgcaaactgaacaatttcgtctttagttgatctttttttcctccctatgcctttatcataggtagaaaccagattatattttcagcatcctgtctagaaatcttcttagccagatctataagttcatttccatctttcaagtaatctcaggcaaaaatgttaccaattatttcaccacaataaactgttctttccccagattatctttctataatttttcctgcttctgtgtagtacccagttccaaaactgatgctacatgtttttaatttttattttttgagggtcttgctctgtccctgaggtcgaagtgcagtgatgcagtcacagctcactgcaaccttgacctcccaggctcaagtgatcctcccaccttagccttctgggtagctgggactacagatgtgtgccaccacactctgccactctgctatttttttttttttttttgagtagagttggggttatgttatgttgcccaggctggtcttgaactcttgggatcaagcattcctgctgcctcagcctcccaaagtcctgggattataggcatgagttaccatgcctggttgttttgttttttgttttttttttcaagatagtactgtactttctggtaccaatttctatattggttttctgtttctgcttaataaactctccaaagttattggttcaggcaacatctatttatttgctggtaattctgcagttttgggtgggcttggctggacagttttctggatttagctgggcccagtcaggcagctctggtcctctgatggcttcactggggctggagagtttcagatggcctcattcatgtggtgggggccccagtgctgggcagttgctaggcaggcccttttctctctgtgttctttcactatttagtaacctagcccaagctcctgaaatggcagcaggagtattcaaagagcagaaaggtgagagctgcaatgccctttgaggcccagtctctggacacacacagtgtcacttctgcctagccctgctggccaaaataagtcacaaggccagccaagacacaaggggtgggaaatagacccctcgtctttatggaaggagctgaaaattctatggccatgtgttttaaaactaccaccccaccattccataccttcagagtattccagtcaagaagcgaaaattattcaataatgttgattttctagaccagggatcacaaactgaatgcttcagtgtgatcattggcatgtttaaaaaacaacccaacatttcagcatcaggaggttttaccttaagctgagtcctgatttctgtcttcttattaacaaaatggaaatcctggtaataccgggcttccatccctgtgtccctgaggagctggagctaagtaggctgccacctttaggtggggcgtgtcttctttagttcatcaccgtccccaccactgcccattcacttgggcaagatccccacccagctcccaaggtatctgagccccgtgacagctcctcattaatcagggctgtgaatcagaatcatttgcaaagcttttaaaatggcacatttcagggatctacccaagacctctggagttctatttgctggcaagcgcagtttgggtgtaagcattttcacaaagctttgcacgtgcttctaatgtacacctgtcatcaagaaccactgatttaggataatattcccacagactagtgtgaatcattgaaaaatgactgtactttaaacttatttccctactaaaaaatgtcaggtgcgttcacatttatttcatttcccttcccaatttctctgtgaggaaagcatgtgatgaaacaaagataaggaaattaatttgtgaattgctgggaaatctaattttgtctcctgaaactctaccttctccatatttcaaaaaacaaaaacaaaacttcagcatttattacagcctgagggatcttgcacttgtaggaaacttgtatggaaacaatacattttagtaatgatccttttaccagcacctgaatgtctacctactgaaagatatatatataaaaatggaagagaactgtgaacattagcagctgctgactacctatgaaagatactatggaggtgtatcattcaccacaaaaccaaggggaaagccttacattactttaaaaggaccagaaaacatgcatgtattttcgcagatgtacatgtctcagaaagcagcttctgttacagtattttattttggtaaaatacttttacaatggtcaaaattatgttttttagatatagtgagctctaatttgagattttttagaaagaaccatgtttccttgacctgccttctcagtcttggtagccagttctctctctctgttcagtacatgttcatagagcagtaagtaagagctgagctagctctgggggaccagcagagcatgcctgccctcagtgagtgcaagtgccgtggaagaaaggtacagtgagaaaagttacagtgcagtgcaaatgccctaagagagagttccgaatcactgctttagaaggcagtgggaaaaacacaacttcaatcttgcttacagcaaatatttcagagacacttggtttcctatagtgaattcagtaaagtctgaaccttaaaaggggggtaagcacattattatcttttctatttcatattttaggacattcatagaacacccgaaatgataatatgatgtgaaatgattgttaaatggtttctttagaatttctactcatggtctatctcttctaattcaagcttctttgttaatatttggtaaatggatctatttgtcctgtcagatcttaagtatattttggaagctgtgtacgttcaatagatttggctgaccagattcttttcaggtctttgaaatattaccccagatttcaggtgtggtgctttctgtttaaaccaagcacttggtaatagttattaattttgtattgaaaaaaaatttactatcttgaaatacataaagtttttatttctccaaaggttttttttttactacgttattacttgtaatgatttattgtataaaaaattctcaagtctctagtgaaggagacatttgactttcttttttttttttttttgcaatggagtcttgctctctcacccaggctggagtgcagtggcccaatcttggctcactgcatcctctgcctcccgggttcaagtgattctcctgcctcagcctcctgagtagctgggattacaggcgtgcatcaccatgcccagctaatttttgtatttttagtagagagagggtttcaccatgttggccaggctggtctcaaactcctgacctcaggtgatctgccagcctcaacctcccaaactgctgggattacaggcgtgagccaccactcctgtccttgatcttttatttaaatactacacatattacttattagtatgtgatttgtcaacattctgctaaatttggatcaaggccatggctttctttcctttctctggggagcagaaatatctactttacatgctccaactattcaatggatggatgaggttaaacaaaatagtatcaaggccaaagacagtatttgtaagaattatacaaatgctattaaaagattttctaaaattaagaaaaccttgatttttttcatattattgtagctcactttaaatatgagatgtacaattctgactcacagtgagaaatagaacagaaaaccgtttgtgttactcaagcactgttacatgtcatggttctgtgaaacagattttataagctttgggatctaacaagaggctgagaccctgtttggtttataaatatgtgtgggatattatttaggtcttcagaaataaaagcagagaatcatttccttatgctatcagttcctctatgggaaagcatattaaaatgtagaaaatataatggtatataatttagcaacataatatacaatgtgggttgagagacaattacagtgttttatttccctatactttccattttaactgaatgcattttagcaacaattggtttctggctgtaacattattttagctgtttcataaagctttatagcaaattactgtggtgtaccagataaaataaattcccgacttcactcttaaaagtcatattatgagcagacataattttttacttttataggtaagcatgtattttataacaatttttggggcctgtcaaaatctgagttcaggattgctgttgctaacattattttagtggtttcctctgtatttaagattaagggttcattttatgcaacaaatcaaccgtcttatgccagtttggttcatagtaagctgatgtatacagtgctgaattctggggtcacacatcaccaagtaaacagcagctacttgaatagaaccttgttgtatttttcattcacacagtgcccgtagtgtactgtctccctaggcagccctaccttgccctcctttcaggtgattctggaactactctttggcccttgtgaatacctttcctgcctgccaccacccagaacatttgaattcttgctaccgtctcacacttcttacctaaccctaaaccccatttgggcatgttttcacctgagaatattataactccaccccaagatacttttctgtttggaaaagactagagaagaatagaacaaacattcatgcattcatctctcagatataattgtcaacattttgcatatttcctgcagactttttttttttaaggaatgtatacttgaagggttcctgatcatatttcccgcagactttttttttttttaaggaatgtatacttgaagggttcctgatcatatttcctgcagagttttttttttttaaggaatgtatacttgaagggttcctgatcatatttccttccctccttgcccggacgttacctctcccctggtgtgtccctctccagtctatgttttatccttttatcatattcctatcagtctgcaaacagtttgaacgattgtattacacgctcttaaatttgtgtatataaaaggtaatgattttaaaagttgaggcatagtgttacagtcagattttttcaatagtctgatgttctctagaattttgatctcacaattcatgtttctctttatgcctttagtattaatatttttgtccttaatgctctgttatagtaaccaaaagaatgccttttatgaatttaaatgaaataatgtatatgtaagacttgataatctcggtgtaatcacctatggaatgtatagaagatataagatatatttttatcagtcaaaaaaagtgctttttggtacagtttagtttttaaattctacacagattctcttattaaactggcaccttcttttaatgagggctttttcctgtaactattaagagatgaaagccccatctcactccataaaagtaatactaggagataaatgaggaaagaaacgagcaaaggacaagaagacttctaaaagtacaaaaaactcagtatgtttttaagtactgtatatactggaaagaggagagacggtaaattttccaaattactatttcgaaaatagtgcatttacctttgaaactcttacctggtgaatcctgagctgaacaccttttacccgtgtcctatagcattctggcaaagcacctgccatctttctattcctacacaggtaggccaagttctctctgcagtgagtcccttttttttatttttgttttttcaacctggggccttgctttttctgcaaggcctgaccaggctcctcactgctgttaattacaagttggattgcttcaaaaaacctggttgtgtagctgagagaggctttcctttactcttaagaagagccaagtgtaatgccttggtagatgaaagtggaaatttgagatgaaagatagccctctatgttgaacattgagttaattgaggtataacatgtgtctttacaaaattgatacatagcacaattaggtataatctggtagccaggcaaagctttctcctgtaagctagcaggctgtagggtgtcctgcaaaggcaaagtgtatgagagcatttgtccctttccaactgcttgctatggatagatgttacccaggtcccttaagtgaggttggctgatctacagaggagtagggaaagtacaccttctcctctgggtcttctgcaagccttgcgactaaagagtactttccaattgtcagccacccctactgggtcttctcacttattacccttttattagtatttgggcattccagtgactaagtgataaacaattttaagaaatagattggttaattctgaataataagtgtttaatagtctccccaacttattatatctaagcatttaaaaaattttctgtctgattttatatgttagaattgttaaatggttgatatagtttgatgtgatgatgtgttgtgatgtaaatatacctttggaagattgaaatgttcataatttataacttaggagagtgactaaggcagatgcattctctccacataggttgagcatttcgaatctgaaaataggagatctgaaatactccaaaatccaaaactttttgagcgccaatgtgacgcccaagggaaatgctcactggagtgttttggattcagatttttcaggtttaagattttcacctattaagtatgatgcaaatattccaaaattttaaaaagtgtaaaatccaaaacatttcttttccaggcattttggatgtagcatgttcagtctgtactttattgttttccctaaaatactggatttttattgacttgtctaatattcagggaaaaagtaagctaccctagcatgtaaattattttccgaagccattttctcatttcaacttattagaatttccaaacaagacacaaatagagaggaatgtctctggaagaggtggcagttcagaattcttgggtagctcaagaatgactctaaacaaactgacttattagaaatgcagtgtagtggcaagattttcagtgatgtgttcatattctgaccaggtttctggccacaaaatatttgatggtaaataggtagcaggttgtcttgatgttctttgtaccacctgtaaaatactgcttgctccacatttcataattaagacattcgtagttgtgtagaataaaaacatatccttctgggaaaacaacatgcctagttcatatattggatgatgctgtcactgttaaattctttgggattaccacagttactgatacaatttgccacatcttttctcaggatacaaccatttttaacactttatgcgttgagatgagtgtattttacagggagacatattgttatcgcctccagaaccccctccctttcagcgattttgtcatgttgctttaaagaagttagcattcagtcagtgcttggtctaaacatgtgaccaaaacaatttgaagcatacaattgagagtatacagttgtgattttttgtttttgttgttcttggagatatccattaacatgtgatatatccataaaaaataattccagctgtatgtaacagaaaactcaggctaaagtggcttaatcaaatgggggtctccctttctctagtttagaggaaggcagcccagggcaggtaggtagctttgtaatgtcgttggatctgaggttctttctgactttctgttcagccttctttttggttgttcagctttcatcctcatgcttgttgcctcatggtggcaaactggctgctgcacctccaggatccttgaaggtagaagtcagtgaaaagtcaaaggtacaaaccaataaaacctgctttaagctttctgcaggaaagaaaagtcaaatccgcttaaagagctttcctggaatctccaactggtaacttccgtttatatcacattgaccagaagtaggtttctttgccatccataactgcagtgaggttgagatatttagtttctcagctgagaaatgttgctctgcacaaaactgggttaagtcactaagaaaaaaggaggttaggactagactagacaggcacaggctgaagagtccatcccacagtgcctgtgtgccagagactgcggagtagagaggccgagatgaagtccaggaagagggcatgtataagagaatgacatttttttctcactgatttaagagcaagacaaaactctactattaggaacaaagggtagaaagaagttaacattctgtggtcctttctcttgaaattgaccacagggaattcttgaattacagcaatttgtagtgtaatagaaattttgcaggccctgagttaggcgaccgcggggcctgaccctagatctgccaatatctgactttgttctgctgaacaaatcgcttcattcttggcataagggtttcctcctttcagctctaaaatgagggcgttgaactcatcactatgatccctccaaggtaaagactttttgattatctgagtttgttgtttacagtttactcggtttgactccaaatccagctctctttagacatccccacacgtgaagttggttaatcatagtgtttgtggccatttttatgaaaaattaccatcaggttacttgtttgccttagttgtttgtatggaaagctgaggtatgctcgttttcaggaatgttacccttttgagatttgcctgtggctcagacctgtgaccacacaagggagtggccctgttaattttggtgttaaagttggattttattttctgaaccttcatgttcagagctgtggagagaggggagaggagtcctcaatttcatgtgagtgaggggagtttattcccaggttcattgtcattggtgttaaagtagctcctctcctgggggctgggaggaggagggatttagagtggtttccatcttgcacacaccaatagcattcctctgtttgtgttggcattccagtacaggaccaccttgggtcctccccttatccctgtctgtgcctccagcagagagcacctctggcacacccacgtatctgaaataggaagatgattaaactgatgacaattgctccatctttagtggcaaaatgtgcctgaaagtaactcaaggaggcagtggtggtgtgaattcagataatcctgagtaatgatgggaaggaatgtgggggtcttgcctcagcaacactttggtcaaccttcgaggttgtagcaggtcctaggggctgagagcagcatagggtgtctgtggatgcaggtggcatgggggagtatgtgcagctgaggtgcaggaggaggacctctgtggagattcttgtttaggatgatgaaattgtatatctgtctttctctctctctttcctcctttcctctctcccttgcactttctttcaggctttaagttagtatttcattctaaggagatatatctttgtgttcagttgaaaatggtggacaaaaattttggtctcttaaggcatttgcccttgaataagaaaaaaagatttcagttagaaatctgagcaacctgaggtttctgtatggaatataagaggagtcacaatgaataattaagcaagttatagctaataaaatatacagcacattgcttcaaactaaaacattctaactctacctcagggatgaatgcttttcattattttttaattgttgccagggttgaccttgaaggtcttgtctggcagataatttgttatggtaagaatgagatcactaagcattttagatgacctacatgatgcatagagtttcttcctattatataatggtgatgtgataagtctgtttacttgggaatttattcattcatttggatggtattttatttctcagagcccctctttggcagtatcattgttgctgtactacaggaagatctccttagccatgatgctgatttctgagctcatgtcatatgcatttttaagtgactgctgactcctgatggtccacaaacaccagaggagcaattatccatttggacaaaatggacatgggaagatctaggacatactttctactcttaggaaaatggtattctggaagatcattcttacatgagtagagttgtacaggttttgtgctgatggcctagttatgtagcctttgttactattcagtcttcctttgcagctactacaggacctggaattgcagagtggttcagtaagcctagttactgatgttttttatagttgattttgaagagaaatatggtaaacagtaattcaaggttgtattaacttaattcacttttttccatttatattgtattttatgaaggacagttaatagaacattctggctatagaatgataaacgcatggggaaaaactgtaattttcactaaatagaacaagaagaacctgtcgtattgggaaattaaagttagcaaatacagtttcttgtttgtttggaatgtgtactgaatcttagacttgagtattaagttcaaaaccatatgttgttgatatgcatagtatttgtggggtttatgtgtacaatttgaaaaaaaacaaattcttatttgtggattgtaatatatagtatgtctttgttcagtattttctcttagaaaaaataaagcagtaatacaattctcatgatactctcttctggacaaagaaaatccagtgtgctgttaaataaataagatttatactgtatgagacatatataagaataagaaataaaatcactactaagtattctcatattgataatttgaaaattatcaattttaagttgaagaaaattttagttcctattactgtatagaaaatatttataatttaaaaatatttttggtaatagaaaatatgaatcatttattataaatgatcatttaaattctattttgaacatgtagaaaactagatgccaagtagagtctacataaaatgtattgttttttcttcctggtaattgccagtgaatcctggttcttacaaaccaacaaaaacccaattattttactaaatgtgtagttccttattgctgccatccaattttaaaaggtgcttttttttttttttttttcccctgagacagagtctcgctgtgccctgtaggctggagtgcagtggcaccatctcagctcactgcaacctccacctccctgattcaagcaattctcctgcctcagcctccagagtagcagggattataggcacaggccaccttgtccagcttatttttgtatttttagtagagacggggtttcaccatgttgaccaggctggtcctgaactcctgacctcatgatccaccctcggcctcccaaagtgctgggattacaggtgtgagccactgcgcccgtccaaaaggtgcttatttacagaccctgtgaagttaaactgtgtccttggattatagtgttaaagttgtaaacttagaccatttgcactggtaatgttagtttacattttggtatggtaaattcctactcaagcagctgttgtttaacatttttaaaacttcataaaattgcagcaaaggtatcatgtttgatttcagatacagtacattcaaagtattaaaaacccgtaatttttaaccaagggcaaaagtatgaaatcactctaacaaaagcaaaaatctaccagatttctagggtactacaaactggagcataggaaacacataaagtaagttgtcttgattttatataaacataaaacacctctttaatactgtagacttatttcttcttaatgcctgatgcttgattttttccagctcagaaaggaaaattctaaaaaatcattcaaaattgcagctttaaatcctgttatagctactttttatgtagtataatgaaacatgtagtgtgatgacatttcatgctattctacatgtcacaaattaagatatcaagttgtgaatattttatttttctcaggtttattttgagattattttgagtgtttttatctaatttataggacttatttacactaaggataaattatatttatttatcgttgcaaactggattttattttccgtggtttctctgatgaaattgaggcatcagccatttacattttttaaggattgaggtgctggcagatctattttttattgcagagaagggatagtaccattctactgctttatttgtaactcagcttccttcgtgagatcctgtttcttccttttaatattactcaaagtgacttttactttactcttttctccaaaacagatctcttagttgacagtaggtaacctacacatagattgtgttgtaaaactcagtattaaattgattactgctatatatagcattttttaaagaaaagatgttattaattaaaatacctagactagcccttttaatgtatgatgtcatggaaattatagacattaattttatgtgctataaacactcagttattgcatttataaaatatatatttgatacctttcataactcccactgagttacttgtagcattgtggttcagtggctttggagttgaacagatctgtgttcacatttaggcttgcttactggttggttttgtgagcttggacaagtacaatagcattagggtcttgttgtgaagattaaaattaatgtgcatgtggaacagctgttacatagtaagtgcttgattaatattagatattaagtgcacggaccatattcttatttttatccttagctcctagttcagggtttggcactgaggaggaggtgaaataaatgttgaatgagtgaatgaataaataataactaactcattagagatcctagagaggactgccactacttttctgccttctaatttggagattgttctctttgacttgactcttaacttcataaaggcttatgtagaagggcttggccttgtcctcagtcagccatgctggaagcctgagggtcgggcttgattcttcagaatcaagcttcttttacgtaccggtgaatttaattgcctacactgatctatgctgtgtctattgggtggagggaatggtcaggaccaggtttatataaaataggagatttgtattggatctaggtaaatgacagtggtgtgggaaaagaaaactggagaaaagaaaattctaggcaaggagacttgcatgaacagatgcatagagggtgaaggtatattggggtggttagaccagaacatctgaaaaatacacacaagcgttaacagagctcaccaaatgggtttggtactttcagtggaaaaactatggtatcatttactaaatgataaagtgagcataccctgagtgagttagtgatcctagactgaatgaatttactgttgccataagcagtactttgagcttttgatttctgattttgtgtttttaaaaataaaaacattttgattgaattttccatgttttaaagattactctacacatgaacttttattgcacagatgtcttgttcgtcatgggtgtggacagaaatatattttgtcatatgggagagtatactttctggtatctaaattaataatgaaatgtttctgaatataattcaagttaatgttttattttggtctagcaagtagaagggtcacagaagtaggttttaaagcatttagaaactttaacaagtgaggaaacagtgattagcatcaggacatttttctagagaaacagtacatggcatttgaacaactgggctagctcacttacaccatttactacttttgccataagatattgaactgctttttccagatttattcttatcctaatgttcttcctctttttttttttttcttttgagacagggtctcgctctagtgcccaggctggagtgcagtggtgtgatctcagctcactgcaacctctgtctcctgggctcaagcgatcctcctgcctcagcctcctgaacagctgggactacaggcgtgtgcaaccatacctggctaatttttgtatttttttgtagagacagggtcttgctgtgttagccaggctggtctcaaactcctgagcacaagcattccacccacttcagcttcccaaagttctaatgttctcttgattaacagtttttagtaatgcaggataaagtatatgtgtattatatgtgtataaaattttatatcagtgtgtataatttttaaatattatggttttttggtcacaaaatactgattaactgtgtataagtctgttaatgaggtctaaatatgtaagcaaaattatacaagagttttaaaaactcatcattgttatagcacttgttaggtcaatctaaactatacagaagaactatgcttctaaaaatctacatgctgaaaagatgctcagcatcattagtcacagggagatgcaagtcaggaccactgaggtaccacttcgcgcccactaagatgagtataatcaaagagacagtaacaagtattggtaaggatgtggtgaaattagaatgttcatgcattgctggtgggaatgtaaaatggacaacagctttggataatagtctggcagttcctcaaaagtttaaatatagaattcccatgtgacccagcaattgcaagagagctgaaaatatatgttcacacaagaacttgcacacgaatgttcatagcagcattattcataatagcccaaagatggaaacaacctaaatgtctatcaactgatgaacggatacacaaaatgtggcttctctttaagagtggaaattattgaaccataaaagtggatgaagtactgatacatgctacaacatggataaaccttgaaaacattatgcccaatgaaagaagccaagcacaagaggccacatagtgtctgattccatttatgtgaagtactgcatagtttcttataaaatagttgtacaactttgtgaatatacagataatcactgaattacacactttaaagtcatgaatattatggtatctgaattatatctcaataaaaaacaaaaaagtctatgtgcatttataatactacagccattatatttaccctaattacattttttaaaatatacctaattttcccttatacctttttgaataatgcaagaatcatttaaatgtatttttatgaactttttaatataatccttaattttagttttccaaattaggtggggatagaggattagttgatattaaagtgtattgaaactgaaatatggacttaataagtgagcatctgtgaggaagaacaagatcagaggccaggtttaatgttatcctgcttcttattatcgttaagctttgaaaatatattttctaattatggtttgaaccttttactgcatctcatctttctctttatcattggcatcattagaaaatggaaggtgcttatttattagctaatatgacacaattttgtttttctctcatttcaaaattggcctattacctcttgtcaactcctgtttctgaatagaagcttacttttacaaatcaatggttccttagacccctttggaaattcagcttaggaaatctcctggttccatgttggtgcttctccacaaccttgattctctcttcagatatatcctggctcatccccggtgggactctgggaagggagggtgagcttactgtgcatgttgccgttctgctttgcagttctgctctgaccatttgcacatcatggtttgaatcctttcctctcatcctagtggggaggtaggggagcagctagctatatgcctgacaggattcattgatgaatttctaacgacttcaatttgagcatttctggtatttaaaaaaaaaaacacttgatttacatccctaaattgaattatttaaaaaattatcttaagaatatgcacattctgaaagagatctagattttctagagggttaaatttagacgtataattatgagatcaattttaatttccagtccttttttagtagtgcttaatctcttgttagtgttgtcttctagtttttaatcttcatgtatcatattgtatgctcttttgtaacttgctttgtttgctcttccttcttttgaagtttttgctggtacaggttgacttagtgaatttgttttcattgctatataatattctattatttgaacacaattttgtttctttcgatgaaaattctttgtaatctttattctaaatcatggtgcaatgtatccttttatgtatttctgtgtacaaagataaaaaatttctctagtgtatgagtctgttctcgcactgctataaagaaatgcctgagactaggcaatttataaagaaaagaggtttaattggctcacgattctgcaggctgcataggaagcatgacagcatttgcccagcttctggggaggcctcagacatcttaccatcatagcagaagataaagggagaagcaggcacgtcttacatggctgaagtatgaggaagaaagagacaggggaggttccacacacttttaaacaaccaaatgtcctaagaactctatcaggagaacagcaccaaagggatggtgccaaaccattcatgagggatccacccccatgatccagtcacctcccaccaggccccacctccaacactggagattacaattcaacatgagatttggctgggaacccatatccaaaccaattcagtgcagggtgtgtatatttttttttttttggtggaggtgggtgtggggtgtatatcttcattgttttatacactgttgcccagttcttctgcaattgacagtcctaccagaagtgtatgagtcttcctcatttcacattcttgctaacactgttattaatttaattttttgctagtctgaaggggatgaatgttttcttattgttatctttcaattactttttctttcttaagatcccccgccagcccccagcaaccagattgtagggaatttcaatcttcctggttcatactcattgatattcctataacaacctctatggctcatgtgaaggaaccagtgattaatcggagtggaacatttgatgaggtccctctggctttaagtttacacttatctccctgtatatctggcatgcctattatctaagtctgggtaaccctttgcattgacactaaggcttccatgccatgcttgcccggtcttcatttgtaccacacacccatttctttctcaggttctgctgtctcccgggaactgggaggccctaatgcttatatccccgagaagatctcttctccacctgccaccaaaggcaaggaacagaacaatggaaacagaacagaaataaagtctcaggaaactactctactgcagaagtatctgacattgccttggtgattcctctacttagtattcaagctcccatgagatgcctcttccaggctgtaagagtttatctactctttacaaatgttcactgtcctgctgttatgatgattgttactatgatataggacactacctcaaaaccttttttctttgcatcatttcccagctgcctactgctttgctgcttcccccaaattcatctgctttttccttaccttttctctttcacattcttgccagttgctgtgccccctctgccactgagccaatcccttgtctcagtttgtggacagcatctatttttaaataaaactctctttgctgtcccctacttttgggaagagcttcacaataattgaaaagacatgtttattccataggaaacaccatcattaagttttcttctccacattagccacaggctagtgccctcataccatgcaggtgtggatgccacattcacctcctgagacactttccttgaactcttatctaaaattttatactcttcttcctgccccaaatcacatcccctcattcctcgtttattttttctctttagcaacaatcactatctaataatctatacatcatatgtatttacctttcttttgtcttccttccctaccagaataaaatgtcagtgagaaaactaaaagttaaattagaaatatgttgtcttttatattggtagtcaagatttaaaaagtgtgacctaagcaaatatgttaccccagatataatatgtaaagaaattgaaatattagtatacttaattttaatttccattttatttgggcataatttcaaaaaaagtataactttgaggaaaaagagtttttgttgttgattttaatatgttggttataaaactaagttttcattactgaaaataaattaggaatatcctgtattaaagtactgattgactctctaatataatttttctgttatttagtctatttttaaaaatttctaataacataaggatatgtattaaatcttaccaacaaaattttagttaaagcttttgtttcaggtttagctgcccttggacggcagaactacctgtactgccaaacatcatgcttaagcttttgaaattctaaagttaaaactaaattaatagataggttgcatttttataagtaaaataaatgattactgaaagtttaagctaaaactcttggagctctctcttacccttttaaagactcatttggccatattttgagagtcactgaggacagagaaatgtaaaaaggaaagggtctattgcatgtggggctacattccttctttctttctacaatatttgaaacacacaaaaccagcagcactacactgagccctttgttcttcctgttgggcaaaacactagatagcttactgtaaatatggccaactgccaagctgtggcgcagattcttttttttaaatactgtaaactggcacaggctcaagaattacagttcttccttccttttatttactttctccttctacaccaaagagtttcatctatggcaagagagaaaaacagttgttgtggttaaaatgcccagtcgtcgtgggtttttttttttttttttgccttactcctgaccttgaatagatttcttttaaaataagcagaataacgttattattcttaaattttaaaagagctatgtcctttcatgaccaatgtaaaggactgaagtagaaaagtgggatgagaactgagttgaattcataatatttgttaatagcattctactttaaaaattgattttgtattggtgacttcctaattctcttttgttaatgtcagagatattatcttggtttcacttatagtgatcttagaatactttggtcttagatttcatttttaatgcacctgcattatttttgacattagtaacttgcttccccttgtgttggaatttgtatggctgcaactgagttgaaaagaggcacagggaagggtgcggagttctgcttttcagctgtagggtgtgtctcttttgaaactgttttttttaattcaagaaaaagcttggaaattttgtattttttgaaagaattatttgctatgcgtattaaaatagacgagcaaaacaccaaggatctgcattattaaaatgacatgcctctcacaaaaaagagagatgtcagaaatcagtagatacatttttgatgtaaataccatcttgtcaaatatattttaaatttttgatataaataccatcttgtcaaatactttaaattttgcagggtttttttttttttctttctttgagatagagtcttgctctgtcgcccaggccagagtgcagtggtgcaatctcagctcactgcaacctccacctcccgggttcaagcaattctcctgtctcagcctcccgagtagctgggattataggtgcccaccaccacgcctggctgatttttgtatttttagtagagatggggtttcaccatgttggccaggctggtttcgaactaccgacctcaagtgatacgccaacctcggcctcccaaagtggtgaggatacaggcgtgagccactgcatccagccgattttgcagttttattgatgaattttgtacagggaaacttctaggtctgagtagaaattaaatgtatattgtaattattttttcaaaacatcaaaataagattttatttattgtctttacccaatgcactgaccattaaaattattttatacagtagccacgtgacaacatatttactttttcatttcactcattaatctgttttcttttaagaaggaaatctcactagatgtaaatacaaggatatttgtcttgttttcagatataatgaaaagtagagggtgttatgtttataatcagattttgtgtcagtctttttgggagatacagggggatttcagaaagcacaggtgattaaccagagatagggagcctgcttctactaagctgctctaccagttactgggatgaatttttcagtagtgtcatatatttttaattttagggggattttcattggactgattgaaaataattttaaaacttgggtaaaatattggctactttgcctcagttcccttacacaaatgaaaatttaggttattatactgaggtctgagcatccaggaagttcttttatacattgacatatataattaacaattgttattttttctattttctctagaattttcatgtacagtttcacctgtatactggataaagttattaagctgggagttaagaggcaagcttcttaccctggccttcattgaataataatctgaccttgaggatattgagtctttctgggcccggtttcctcatctgtgaaataatgagtaggactaggccttcttagaagttgcttccaatgtgaagagtctagacaaaattctatgattattttgcctttttaagagactggaatttatgaataatgagaacatgatattctaatgtagtgaatatttaatttatattcaaagaatgtaggtgtagagtgttgcataacttgaggaaatttttcttgtatccttagttcccactgattttaggatcatttttcttttatgataggctattgttatttgatatcattcatagagagaatgtgagtaaaaatggcttacagattaggatatttggtaattctgaagatgttccagtacagataaaatctagatggaggataccatttcatatctcaaaaggcagctgtagaggtctgtgcaaggcttggagtgcagacctgcatttaaatcctggttctgttgtccaagagttttcattcctaggataactcaccaaaatgttctgattctgaattttcttgcttctagaataaggataataggatgtctgtttcacagatatatcctattaactgagtttaaattagattgtgtgtgtgactatacttaacttcaattttaacattaaaaatgtcatcctggccgggcgcggtggctcatgcctataatcccaacactttgtgggaggccgaggcaggtggattacaaggtcgggagatggagaccatcctggccaatacagtaaaaccccatctctactaaaaaaatacaaaaaattagccaggcatggtggcacgtgcctgtagctccagcaacttggaaggctgaggctggataatcgcttgaacctgggaggcagaggttgcagtgacccaagattgcgctactgtactccagcctgggtgacagagcgagactccatctaaaaaaaaaaaaagaaaaaaaaagtcatcctttagttcaagtcagcaaacctttgttgggaatccaaggtactctgcttgggagaagcatatacctacctggataacaagaatgtaaggcatgatacaggatagttggttgtaaatcagaaaaatctgagtgtgatgtagatggaacaatggatttcaataggtgagattgtgcaagactgcctaagaaggtagagttgagcaaggcttaaacaattggtaggattttaccagtgggagaaggcggggagagagagccaagagaggcttctaagtagaaggaagagtgccatcagcattggagggttgaatatcttagtggaacttggcttcccttagaaagacaaacaaataaaagttattcaggaggaaatcagagtatagcattgctttaagaagtaatgtttaattccattagaaattgattctacttacataaagtgttggtttactctaatgtcttctcaaagatatctactttcttgggtatgtgtatgtgtgtgtataaatcagatactgctgaaacatctttcaatttcaagcagtatataaattcctctgctagtaagagagggttgcactcctggcttttgaactgattaaaggaagaaagttcttaaaaggggttaaactatctgaagcatagtcagaaatcagtggaaggattagcatatttaatcttggttattatcccttaaaatcatgctataacttaataacttttctttagaattgatccagtgaatgtttgacttcaagtgttaatgtctttgaagaataaagaagttatcaggtttttccttttatgtgccttccatttggaaacaagccactttttataatgtttcataatgtattatttaaaataaagttgctgtgaactagattgcttgtaggcacattgtatttctggctgccaataggaaatgtttttctcacaatttgagtgggttttttttttaacatgttaagaatgcctctttggtttgtgacctcatctgttcatttttggggatgctgagattgccggtcatatcaccttcaaggatctgagaaacagtggtcaatatcagggcttttatgtgaagagaagattaactgggtatagaaatgagagggaatatgacatattttaaaaacaagataagagtatagtatctagaattctattcctgtcattgtcattaagtcatcagaacattttcagaaaattaagacatctttcttttttggtttatccaaaaaagaacatttttaatgaaaagaggatgatatttaatgttattatgtttgaccaaggaatagaacttactttaaatacattctagtttaaaggactaatctttatttgctaaaacttcatgcatgtgtattttacttcaagttttagagtccgctaaaattatggacatgagatttttatacatgagcaatagtttatcccttgttatttctgttctgactaggaggccaactgtagttggtatatgatagtaacagatatttctggaatgaataaatgaaaaaaatcaagggcatagaaataagtgttgtcattgaaaacagttgaaagtttgtcggtctccctctactcattctaattttatactgtttggcctctgtcactcactagcttatgactttaagcaacaactgtgtgtaatatatataatttttagcttttccagtaaaatctctatcacagtatctgtctctcaggttagtgaggattaagtcaggtactgtttttattttatcaaaaatttaaggaaagtgtacagtgtaaatttggtatctatttcaaatttcgggtgcttttgaatatcttttcctccttttttttttctcttctagtgaattagacactacatttaaagggattgggtgcacacaaggtcactaggtataaaatttttcactttcaataacatgggatatggttatttaattaagtgttgtaatgtctctgagagcctcctctgtttctgtatttacagaattgtagaatcattaagtcatcaaaccccaagggggtctcaagcatttatctagctcattctgcagacaggactggagaaatgtttatcagctgtctcttctattatatgattataagaattaaaagtaaaggcaagagggggtgcaagagaaatggagatggttaatgggtacaaaaaaaatagaatgaataagacctagtatttcctagcacaatggggtgactatagtaaaatatagttgtacatattaaaataactcaaagagtataattggatcatttgtaacacaaagaataaatgctcgaggtgatggattccccatttaccccaatgtgattattatgcactgcatgcctctatcaaagtaactcgtataacccataaatatatatacctaccaaatacctacaaaaattaaaaattaaatacagggagccagacatggtggcacatacctgtagtcccagctacttgggaggccaaggcaggaggattgtttgagtctaggagttccaagctgcagtgagccatgattgctcctctgaatagctactgtactccaggctgggtggggaatagagagaaacttccatctcttattggggggcggggaggagaaggaagatactgaccctcagtgtaaattggtgaaaacttttctaaaagtaatgagaggaacgttacgtttgtaatttcctaaataaatacttactggtaaaatggatccctctttattttatagttaaccagactatgggagtgtcatgtgctttttccagatatctatattttagcaccccctcccattcatccattttaatttcttataaacttcatagttggagaaactccaaccaaaactcctgattttgacagcatttcatgtaattttactcctaacaatacacgtctgtttctttcatatgtagacatactaatacacgcacatacagtatttgaaaaaaagttatgtaggaaggctaattatatgtttcatctaaccataacactttcatgattacattcacagaaaaaactttaacaaaataaaagtgaatagcaaccatctccttgcttagtattttttttttactgttgaattatcctaactgatgtgcagtgaggttgctccaaatacttatctgtagaaaaataaatattcagtagacagaaaatttgccttctgaacacttgccttcatttttgcatcttccatggcatgtttgaccaggtcagtaatggggctcctagggcccaaagttcaggtttcctttcgtaggaagcagaagctctgctttgttatgtggtcacattgcatggctgactctggccagttgtcttgcacctgtcactggccatctatccctatgggacaacttttaccatccatcaccaccgctagaaaaacacttcaaagtgcatgccttcctgtggatgggctggctgcatcatctcggaatacaggaaagcatgttattactgatttagaaagttactacttctaaaaaggtggcacttggttccagcccctcagtgcccatcaatttcacccggttctttgcagcatatggagagactgggacagccagcatggctccccttgagctcagcatcaagtcttgttgccttttgcaatatcacttttttattttatcgccttcactgcctttccttctacaaaacagttgtatttgttttgtcttgttctcctctttaagatcctgccagaggggcacatagatgtctctggatatgggttgatttaatgaaatcagagtgggcacaatccatttgctatagagaaatggcagattatactttaaaatgaagagaaaccatgaagaatttaagagaaacagcatagtgattatactcaaagtgctaaagaagtatttaagtatcacttttcagatctcttagcagttaaggtttgtcagttgattttatttattttttaatctagctctaatttgtcatgcctcaaagtgaagtatatgtttctgataatgctaccatttggggcatttatttctgtgggcaaatgctatcatcataaagcacgttggggaaatacaaattaaacatattggaaggggcttatgtatgctaatatgaaatggtattgtaatttctccgaaattcatgttatgggtactttaagaaacaaactttctaaagagatcttcattttgtcaatttgtaacaagcattttgaagccataaaaaatcgctaatgcaatgccatgtacagaatcatgagttagatatttgccctggtaatccattctggattagttttgcatgaagcagaatgagggaaataattattttctctgctgacaggtagttgccaagtgtgaccagccccagccccacttcttcccaggaattctacaagtacctactctattttttacagaatgtagttaatggtgttttttacagaatgtagttaatggcagcaagtgggtagaagaggggagctagaatggagctcactgaagcaaactcaacaaaggccaagagggaaagctggtgaggacgctgagggaaaatgtctccagcctagtgtcaacaagttctgtctctacatggctgtgtcttttgggaaatcatgctggaccaaacagagcagaagatttatgaattgagattaaccgctttctggggtctccctgtgggtatctcataaatactcatttatgccttttatagtgttctatcttttctttgacttattctccccattgctggtttccataccaatctagtcttcagatatcttcctgctgcttcctttctccccacatttgaaattcagcgaaccattatatattgatgtaaagttccagacgcctattgtgcatgcaatagctagggccagggaaggattaaatacaagattgtatatatgaaagtaccatgttcattttattaataaaaatataccactgtcatttgttactgctagtgacaataatgtgtcattatgatgtaataacaatagcagagacagggtggggaagctattttcttcccacgattcgattttcttctttgaagaggtagtaattcggttgtacacacttaatattgaagcacatcccaacccaagaactaagtaactattgttattacgcatccccttcccacactaagggatttttaagctgaaaccgcaagtgtacaaaggctcagaggtgagagacacagcaagaatctcagctggggtttgtggggctatgggatttgagggagtgtggtggagaggaagaggtagaggtgactggcattgtgtggagagagaggggtccaccaccctcacaagggcatcaggagaagtgatgaagtgatgcatctgagagacatttaggaggaatcaatagggagatatggaactgatggatggtggcgcccaagggaggggaagaagtttaagatgatatatggggacgagttttgtgcacctgggtaggttgtagaggaaatacagcaggagggcggatgtgaaagacggttgctctggtgcctctctgggtgaaaggatagcaggtaacttgcagaaatcccccttgactttttttttttttttgaaagggagaatgtatttctttttgaagaagtttacattgaacctaggaaaaacacaggttttcaatgtttttttttttaaattggatttcttcctcaaagactgttctagttcccccttcactgtcactgaagtaatgctgagcataaatctttcttgaataatgacaaatttttgtgtagttctatatttaggaggtatattacacttgcctttgtgattttatggatattaggttgggattgtggttaagctaatgaactgaagaactcaatctgatggtctcatcattcaatccagcagcctgtcttaaatttcaggctaatatctatgtttatacatgattgcttagctagaattctttaggtgtgataacattgttcgtattcaacccaagctgaattttaataccatgactttttaaagttcatttaaatatacctttaaactttttaatcttttatgattttcacttaaattatggcattgttgatttaacattatgattgtatttatataatatgacatagaccgatagagcaattatcgtatgccaaaagtatatgtataatatttgggttgctatattggctcaagcaattgcattcgttgaaaccacctattaattttggggcagcttttgaaatgtagcaaagcacacaatctcatgacaaatccactttattatgtattttgtttcttttggacagtgcctcaaatgtagaggtactgaaacctttttgtgtttttcagatgacatgaacacttgtttaaatgggcaaacctagaagtgataaaatgcagttctgggtttatagagtgtaacacacctctttctgcctttatgagggatgtttcttacttattaaaatagtatacaggcttagcataccccatggaaaataagcaaacctttataaatcataggagtgaagtagtttttttgtaggttggtgttattgaagtcatgttgccagtgtaattatacatctagctattctcttatgaacaaaatcttaatatagtacaaggtcatgttattgttatgatagcctagtaaattaatttctgctatgattcttgcctgggtttttttgggggggtaattttagcttttgatattcaggatggagagtagtccctctggatttaagtatgtggggaaagagaaaataaagcagaatttttgatgatttgacaggtcttatttttgcttcgtatgcaaggattttgaatgatgagagaatagagacatgttgtttcattttgtgtgaatttatcaatttagactttgttgaattggtacttgtgtcttgaaatttataagtgaattctagagccaattattttttcccttctagaatatcttagtattcttttttaaaagtgctgagtactttttaaaaagtattcttttttaaaagtacttttaaaaaagtattctttttcaaggagtgaatttggggttgctttgaagtctcctgacatggggtaccttggtatgcttggtagagctatgacaggttctgctgaagccagggagcaagccatgactgcacaacattcttggagggaagggcccaaggaaaaggatttggggaaaggcatggaaacaaatatatctttcttcataattgttaatatccttgtatgtggatacacctgctttgttatttttttttgatttggaaaccaaagtaaatttgtctaacattatatattttcaacagattaggtgtttataactccatacttcctgaaatctttctagaaatttatacaaagatttggaatattaagattggcagaagttaggaaataaaaggtttgaatttatgagatgtacagttttctggggtttttttgtttgatttttagattttgatattacggataacttttgttatacattgaaatacttaaaaaatttctgtggctgtcttataaattggtgagctttgttgggagagttgacaagagtcttagtggggtcagtgcctggaatttccgggagtttgtgagcttggatgggaaaaagttatacttgtattttcactaatatctgattgaaatttatcatttcccttaattatgaatgtaggcaaaaaattaataagaaaaactgtgactttgctgctaatagaaattatagatattttcatatcacatggttgtagagatctcaaaatatttaagttcatcactactgtaaattacagtatttattaattacagctggatcttcttatttcccacactaataaagcagcatattactgtatcacattttaaaatattttgatacctgtcaatctgattgatttctcagtaatctagttatgatacttaagaaacataatttgataagggttacgtagactttatcaggctgccaaaagatccatggcactaaaaaaggttaagaaattctgggtaggggaaccaaggaaatgagtattctagagctggttttaccagtacaggttgagtatcccttatctgaaaatttgaaatctgaaatgctccaaaatgcaagactttttaagccctgatataatgtcacaagtggaaaatttcacagctgacctcatgtgagaggtcacagtcaaaatgcaggtccccaacacagtatattcagcatccccaagggaagaaaggctttcctagcccccttcaactgtgatgtatcttttctgcacatgccagatatgtgtctcatattttttattgtgaagtacttacatggaaataagtgttaagaaaaggattgcttattggtagcatatagatttagagtcaggaatgatggtgatttcaaacaaccacagattgtccacatgggtggctggccaggatagtgacacctttgctttctaatggcttagtgtacgttattttgtttcatgcacaaaattattaaaaatattgtgtaaaattagcttcaggctctgtgtataaggtgtatatgaaacataaatgaatttcatgtttagacttgggtcccatccccaatatatctcattatgtttgtgccagtattccaaaaaaaaaaaaaaaacccaaagccaaaacacttctggtcccgagcaatttggataagggatactcaaccagtcatctcactgtgtgaccttggacagtcaggccatatggcacattgtgccacatgatgactacacccatcaacataggaaagtattataaagataaaacaaaggaaatagctttgaaaaattttagtattatgcatgcagaagatgttattaaatggaattgttttttgcctttgtaaggacctaacacatattgttaaggattgttaagaggcatctaatatgaattctgcattcactctacaatttcagagagtagctcagtatcattactctttatagggaacttctacgggaacaagccaattccaatatagttccagaaacattaccattcatggaagcaaagaagattacttttctctaaatatttcttctaaaattgattcctgtaatctccaattctgtaatccaaactgacgacttcagtgctccctaaagcagtgtgtcagtcaggcaaagcatgggagaaaagcgcatgtttcatttccaacacactgaagcgtagtagtatggcgaagctcctcgagttatttaaaggtattaatcaagaaatataagaaatggcaggagggaagaacatactgagcactatgtatggtgttttacaaaaatgtagttttcattacaatcttatatagatcataaatactatggtgcttaacagataagtaaactaaaattggtaggcagtttactaaatggtcatcttacccagaagttatgaaacttagattcaaattcaagactaattgtaagggcatatgtttgaaataaaatgtaattactgagtaaaattaggtattaattttgaaatgtgagatcttctttagaattttctatctgtaacacaccattttccattgacacgagagactgaatacagtttgagcagaagagtatttttacccctttgaagtgataggtgagacttgatgtagagatatatgaaaagtcggctgggcgcggtggctcacgcctgtaatcccagcactttgggaggccaaggcgggtggatcacaaggtcaggagatcgagaccatcctggctaacacagttaaaccccatctctactaaaaatacaaaacattagccgggcgtggtggtgggcacctgtagtcccagctactcaggaggctgaggcaggagtatggcatgaacccaggaggcggagcttgcagtgagctgagatagcgccactgcaatccggcctgggccaaagagcgacactccgtctcaaaaaaaaaaaaaaagagatctatgagaagtctagactttaatggttacgagtagtgctgtaatttcatgtaaaaaatcctgtccccgatgcctgtgactttgatacataaatatattttgaagtctgtgaagtgaataaatgactgaaaaatggaaggaaggtgtgttctgacaggtccaaattctgactagaaagaaaacaggactttgacttgggatatttaaaatctctctgcttttcagacaacgccaacagccctgaagagatcactaaaagcagaaaagaatacaaaagcaatatgttgtaggaaaagtaaatttgtactcttgattagcccctcatggtcactcagggcttcggcatctgtcatttcacgtattgtccttactcacaggaactctgaggtgtggtggtttaaagcagtgtcctctccactttatggatggagcacaggaaggcaaggcaacgttgtcacctttatagatgacactcactgctaggtcttctgattcaaaatctaaccacttttcaaccgcatcccgttgtagttgtgtagtatgggagaaagagaaatggaataaatgaaaagtgtttgaacggcatgtagaaagatgtcataacggaaacgccatgagagccatagaggagggcctaagtcgctcttcctacaattccctgcttaagtcagcccttccctctctcctttacccacccctctgcagtcaggttttcctattatagattctctctcatatactccacagcagttattacaattgtaattatttacatggggaattttttggttgaatggctctgtcttctttgagtctagattgtaaattccatagcaatgggaactgtgcccattttcttcactgctgtatagtctcggcacacagtccctataactctgtaacttttgagcagatgaaagcgggagtgaatatgtacaattccgtaagtgaatggaaataatagaacagccaatgtgaaggtaaaggctcagacttcaaaaaatttcatttttaaaatttttaatttttaaattttaaagttttaaagtttttaaattgacaaataattgtacttattcatgaggtacatagtgacattgtaatacacatatagtgatcagatcaaggtaattaatacattcatcatcccaaacatttatcattttttgtgttgggagcattcagtatcctccttctatatgaaactgtataatacagtatcattaactgtagtcatcctaaaatggtacagaacactagaacttatttctcttacctaaaaggaaataatgcaaacagcctgaaatcttgggatacgccacatgtcttgaattttccaggaaatctgtatattaaattttaggggctgggtgtggtggctcacgcccataatcccagcactatgggtggcctgaggcctgtggatcacttgaggtaaggaatttgagaccagcctggccaacatggtgaacccccatgtctactaaaaatacaaaagttagctgggcatggtggtgtgcacctgtggtcccagctacctgggaggctgaggcgggagaattgcttgaacctgggaggcagaggttgcagtaagccaagatcgtgccactgcactccagccttggtgataggagtgaaactctgtctcaaaaacaaaaacaataataacaacaaaactttagggtagttatctggttatgtccctcaatttttggttcagaaaatatggttacctatacctcagtaaccattaaaagtaaggtacaccttgtaagaatggaaggagaagggaggaccctgaaggctgtgaaactctgtgatagtcccggatcaggtggtattaactccagtttaacagctggagagatggtggaccagagagatttaacttgtccaggattcagataataaggtgtcagagttgagattaaaaccagagcccacaatttcctattaatgacataatgttggaggagaatggaaaaggacaatctcagaggcccctaagggcagtaacttacagagctacttctgggcaaggttcaatctggcagtctcattctttggcttcttcaaagtcctgtctaatgatgatgttggcaataattactgagacattgacagaatgttaaattatattacatttaagaaagaaaagaatatcgtagcctagagatttttattcaaagtgattaaaggtttagcattttaattctgatgttgaggattcttatgtctaaattgattctgggtaactgatgtgggctgtcaatttagagattctctatttttatttaaaatttattctggatgtgtaatctttgcatttttaaaaatcctcaacttctgctggaaggttatctgaaaacaaacacttcactgtttttatttagcagagattcattatcaggcgctagaatacaccataattaatacatggtctttgtcttgctggagcttacaatctagtaggggaaaaaacacaaagataattacaattcagggtgtttatgttgcaaggggccttgggtggcatcctgaggaggcagtctatgagggtgacagctgtggccagtcatacactttattatcgtggaaccccagactttatgggtgtaacatgtaactcaccattactgtttcttgccaacccatacttaatattgtgttataagtgatgttagcattatataattaagatgaacacttacctgaaagcatctattaaaatacctggcatataggatttacagatttttaattaattctctcataaacccagttaattactctgtgaattggaaaaatttcagtcagaatcaaaatatttcaaactgattcaaattatgattctttttataatccaaacacatcctaaatccaatagggatgatattaatatgtcggatacttataactttttttaaaggttcttaagggaaaaatgggtttgttactgaagaatatatactaatatagtttttgtgatgcttttggctgagttgtttgttttgcctataagcactttagctttaccgtaagagcctttaatacacagagcatagagtaggaaagtaatgagcacactgaaggcagttacacagtgtatagatcttggactatgttgctatgatccacttttagttggagcttttttgttttgtttaaagaagaaagcagaaagcacatagtgtcatgtaggacaaagaacatgtgtacagcatgcttatgtatatataaattaataatgtcaattatattatttttccaaagttctctacagtgcttgatgctaaataagcaaaatgataagaaagtataaagtaggggcagatgagcaatgtatttatttgtattgccaagattttctaaatggcttaggatatcccttttatgtttttgtacttgagcagtcttgctatagaaaattccatttcttcttagccactcttactaagaaattcctttcactttgttctgctaccttgtcttcctgtttagaaggaaacaaagcaaaccccggggttgctcctccaccactatgcaccaattccttatttgcacctattcctgccttattttctcagcctgaatgctcacctggctccagcctctgtagttacatgggataagctgattgtgtgtaaagatttagctctcctgtacattacattgccattcttaaggtttataaattatcagcttggaggtttctgtgagcctcttgaaatgacacgtaacattctgtatacatactacatgggagagtctgggtacacagcttgcacgtgtttctcaaaggggtctgggacaccataaaatatggagaaagtgggaggtgactcttagatttccacctgtaccaccatagccccttttttaaaagaacaaaactctttaaactctgatacttggacagcagtgaaagatgtactgatgactagtttattttggcacatataaaatttattgatattcatttgtttatcccttagtttcgtagatatatctgccatttgtgaatggtaaaaccaaaggtcactagaatcctttgttgtggggaaggtatagatcgtacatctaacccaagtggatgtgtatcacctatatgatgataaaaatcctaacttctatcaggaacatgtaagaactatgtggtctgatacattctaaaaattacatctaggttacaaaatgttcaaattattagctttcttttttttcccccctttaaaaacccatggtgagggcaaggtagaggaaataaacacatttggtcaaatgttgggtgtagttctaaggaaaccaacttataatcttttcagatgatatttaagttgaatgggtcagaaaataaaaaaaagagagaggactatatagggaagttggaccaaaatcatagattagcagaagcatttcaatgatcagttcattcaagcatgaattttttctttttacagctctctcctggtaaatgatctgaatgaacgatgcttgaaaaatgattcttgcactctgtgtgtgtgtgtgtgtgcgtgtgtgtaaattgtggtttagcttattttatgtgatccacttagtgtttttgtagatgttttctttttctaagatcaaacttggctaatggaaatactcttcttggtatgttattactgtgttttaaggaaattacaaattacaaattaacttattagccaggtactctaatggattaattataagcatagctataagtgtgttgaaaatgcaagcctttttttcttgagattctaagactactacttttaaaacctcagtgattaaacagtttcatataatttaaatttagcaaaaaagaacggagatatggcattttatttttttttttattttttatttgttattatactttaagttctagggtacatgtgcacattgtgcaggttagttacatatgtatacatgtgccatgctggtgcgctgcatccactaactcgtcatctagcattaggtatatctcccaatgctacccctcccccctccccccaccccaccacagcccccagagtgtgatattccccttcctgtgtccatgtgatctcattgttcaattcccacctatgagtgagaatatgcggtgtttggttttttgttcttgcgatatttgactgacaatgatgatttccaatttcatccatgtccctacaaaggacatgaactcatcattttttatggctgcatagtattccatggtatatatgtgccacattttcttaatccagtcgatcattgttggacatttgggttggttccaagtcttcgctattgtgaataatgccgcaataaacatacgtgtgcatgtgtctttttagcagcataatttatagtcctttgggtatatacccagtaatgggatggctgggtcaaatggtatttctagttctagatccctgaggaatcgccacactgacttccacaatggtgagatatggcattttaataagggatttaccttgcgttaggaacacgtagttaagtaaatatagtcctttgaaagaggatattttcagtgcattttcacaatttaaagatatttgtattttttcctcttacaacagcataaatcaaaaggtaagaacttcctattcctgatgtttattcattttttttaaccctcctcatcaaacctttgccttgcttttaacatgccaggaactaaagtggctgacatctctgttgcactttcttttaaaatgtcaaaaggaaaagatataatggagattgataaacagaaaaatcaatataatatggtattatttagcagaaataattaatgttaaatgaagagcctttggtggaggctttgttgtatgtaacataaaagcttgtcatgttggtattttcctagattcttctaggaagaagtttaaaagttttcgatatcacagaaatgtattatatttggaggaatatgtgtagcattatatttgcataactgaagttatgacttgggggagacttccatgttatatttaccatattaaaagagatgtatagtctagtcatttcatagtgtactgaatttatattgagagatataccttatgtaaaggaatctgattctctgactacagaggatgataatgatgacgataacattaaaaagcataggtactcttttcagtagaataaatgagtttgtcttggattatactaacacttttactacagaaatgaatggattctaattttaaaggtttgtaaatgaagacttaacaatcatttttgtaagctcattataaaataaaagaacatgtattttttgattcaaaagtatttgctaaggattttcctccacatgtgccagatcagccttggaacacacaccccactattccttccattatctaccatgggattataggtttttagagtatttatgaatatataacattttgattcagaatgttcaacctatatgaaattgtcactgaaggtttatcaatccctcccccataatagcaggtgttcctatgaggactctgtagtactgtgtcttctagattgcaaacaaaaagcatcccgtaacacacacacacacacacacacacacacacacacacagtcgtgcttagtgtgtgcttttgttcattgaaaatataagcatatgtgagaaaggctcctttaccacagactgtttgaatgactatttcattttaatctctgatttcttgcatcagagagttgtgggaaagtgaatttttattttagtaacaagacttatttttatgtacacacacatacataggctactgagatagcatttttgtaaattagtccgcccttgggatatgtaccatatacattaggctactttaagaagctgtctttttgattgtgaaaaataatttcataggtttatatggttcctaagtgttcctttagcaaattccaacttacagtagttttatattaagctcccgatacgtttacatgtagaaaattgtggcttaatacagtatagcatagatgtgacacctttatgaatggcactacagaaaaacgtcacttttttctcccccagatgtctatttcacagatgtctgtcttcttcaaatgagaagttgctgattgtacattcatatagttttcttccaatttatataatgtgcatgtagaggcacacgcagaatgtgatggaactagcaacatcatttgtacattgacaacagattttagttttcatcagtattttaagttcatcaaattactttttagtaccttgaataacattttctcaaatatgcagtgatcatactttattacagcaatgtggctttctttgattaatataacatataaaatgttttttaaatttgtctcttttcattcccttgcataatgagagttttattctgtagatctgaagtttacatgtgaaaattatgtgatttttcacattcaagatcttgattgatagtggcactcagtaaacacttgccacttgttagatactagtctgagaacttcatgcacatgactgatttaatactcactaagctaatgtggtgggtgctagccctgttctcattttaaaaacaaggaaatgacaggcccagaaaggttaagtaatttggccagggtcaggtagcaggtccaggatgtgttctacaaaaccgaaactttgcttttcctctttagatttctgacaagaaacctatttatgcgaagtgttattgttaacattgtttttgagctttgttagtagataacttgccagtatcctcccagtgatcatagtggacctcctagctttagctcagtttcggtgacatttgttgtttgctaatgataaacaactgacgggatggccctgcccttcctgtaggggatgagagctgctgcagatgccagagcatccagtgagagaggggtgctggctttgttcccaggtgccccaggagtacagaggtggcactgcctgggaaattcaggaaggctttcttctggatgttataccaggattgaagttaagcagtcagctgtctgaaaagaatcagtgtgggagtggggtagagggttcagagtgggagtagggtagcggcttctgggcaaaagagagactgagcaaagatggagaggcagaaacattatgataaatgcaaggccgttaagtatatgttggtgcttatgtgtcagattttctttgaagcattctattccataaaataaacttaacggtgtgtgctgtagttttccttggggcctctaatctctggcactactcactttccccagaagatatatggatctcaccttgagaagcctgatgtataagtagatatcattctgatgtgggagaggttgaagaatctttactatagaacatttacacttagtttctcaataagaaagctcattttaaaccttggaatgttatataaacaagtggtaatttaattttgttcaattccattaaaactgttattgtcctccctttattgaaataatttagtgatattagttttgtgagctatatttattttttttaaatagcataaaattggcataaaatcatgaaatcacttattactttccattgctaatttggagtataatgtttttgttctaatttcatgtttctcctagctacaagacatccatttaattttatacctccaaaatgaaaatatccttgattaagataattctatatccttcatgattgaatgttgagcagttttatatttttaataaaaataatttcatgaaatttgtttcttttggagatactttatatacgaatgtcattgaaaaaatctgtattttaaatattaatcttccattattgttttgtatcaggatcttgttattttagaatatctatctagtacaggcctgaacaaaaacatgccttgacaactattcgttctgcagaacagtgtaattcattttgttaatacaattctttggaaaatatatacacatattttcaattatttatcttcattgggtgagtggctacctgcaggattggattgtgtaggtttaaatatagttgactcttgaataatgcaagggttagggacactgacaacccggcaccatagaaaatacgtatataactgttgacgcctccaaaacttaatgactaatatcctgctgttgaccagaagtctcactgataacacagtcaattagctcatattttatatgtttatatataatatactgtgttcttatagtaaggtaagctagagaagacgaaatgttattaagaaaatcataaggaagaggaaatatacttaactgttcattaagtggatcatcaaaaaaggtcttcatccttgtcatcttcatgtcaagcaggctgagaaggaagagagtgaagggaatagatggtcttgctgtctcaggggtggcagaggtgaattcccatgtataaggacccctgcagttccaacccattgttaaagggtcaactgtaattttgtacatgtctagcagtataatatcttaggacctgtgatttgtagaataatttttcaggctctgtaataccatttttaagggatggtgaaagaggtattcatccctaaattaaagagcctttaagtagaatccattaggtatgcaatggacatcactaggaatggtttcttatttatgtgggttggcctaaggtgaaactctgtcctgcaaaacaataaaatcttgataaaacatgtaagtcagtaagaagaatgatattagatcctctaatatgactcacatacagagagtctattgttctgagcagcagtgatggtcttttcatataggaatataattataaaaacaatatgcatttgtcttaaaaatatggttttctactctgtaaaagtaaaactcattcatcatagaaaacttacaattccaatttttgctttcactcctctatacctgtctatacatatttttaaaaggaaaaattgtatgcttttgtgtaagcctttagtaaccacttgcatttgcggtatctcatgaacattttccagtgttatatattctagaaaatgtatatatgtgtgtatatatggaagatgtatattgttgacaaaattatattgacgtatttaaacaatcttctattattaggtggtttcttatgatggttttgataaactaaatttaccatagactcttggatttccataatttaaaaattaaaatgaatttgtataatgaaaatatattggtgcttcaagtgtattattttatcagggtttttgaaattaatttaactgtagggttttaattataagccttcttacattttttagaataaagcaggctataaataaatactaaaatactatattatctggattaatcatgtcttgggagcattttgagattgagtctacttatttagacagaaaaataagatccttctaattttgtaaaaactgacgcattgccctaaagtaagtacttcactttttttgctatctgtaatctatacaaacagcttttgaagtttttaaaataagatctgccttgtcacttctggtgttctcattaatgtttattcattcattgtttgactttatattttatgttattttagaaaatgtgttatatagcttgttagctactttacatctttaaatcacattacataagaatctttatttttaggggtttgctttgtgagtttagtggttagattatttgcatctctctacttaaaaacaaaaacaaaaagaacctgatggttggcatttccaaaacatttattaaaatatgattttaaaactatgaaaaatctttagtttgctctctactgggtttcattgtagagggagttcgttgttgtttaaacttgaagatgattgattttaggaataagataaatagagatcagcgaccaaatgtacatgatgtctcatcttttcccaacaccctgctgttgccagtaggagaaaatacacagtgtcacattgagatggggtctttcaattccatcagagtggcagcctgcggtgagtttgcaacccctgggtgaagagaatctcaaagatgccaagcatcattttggctagatgaacaaggagatagatagatagatagatagatagatagatagatagatagatagatagatagatgataggagttgtatgtagagttaagatttattattttagttaacacagaaaagagaaggcaaatactgagtgacctcaaaaataaagcataaggtaatatcccataagctttactctacaaatcaccctttctcaagatgactttcaaaaacagagagaggaatccagaaaaatgtttacagatgtttcattgctggaaagtgggtagtacactgttctcccaggacttatgtcgcaaaatacatcctcattgtttaaggaagtctgcaagggaacagatctgatttctctatcagcccttctccctacagcaagttagaaaattaaaaacctatatttccattggttatttaagaataatattccagaattccctcatttttcaaccacacattaatctacctactttttcaatatcctgagtttaggatactgaggaaacacatggtgtttccacataaccagccaaggcttaagaacagaatggggggactgcattttaagaatgtcactcttgaggcagtaataccacctacaatatctagggtcaccttgtaggtaggcatttatcacccttttatgactgatgaaacctagactctgagtttatcactgtgagtcaatttatttgctcttttattcactcatttactcaaaaagcatttgctgattgatcacttgccaactgtcctgggaagatgctggagatgcaaattgaacaagatgctgccctcgccctgctctcaagtggctcacatctcttccaaggctgttactaagccatgaggcctggggtctgtagagggctctttccaggatcccactgctgacaaaggtcaatggtagggcatctgctgaaaggtgaagtaatagatggtcctgatcagaaagaagaaagaggcaaatgttacatattagaaaagacaaattaggctggatgcggtggctcacacctgtaatcccagcactttgggaggcctaggcaggtggattgcctgagctcagaagttcaagacccagctgggcaacatggtgaaaccctgtctctactaaaatacaaaaaattagggcatggcagcttgcgcctgtaatcccagctacttgggaggctgaggcaggagaattgcttgaacctgggagatggaggttgcagtgagctgagattgcaccactgctctctagcctgggtgagagagcaagactccatctcaaaaagaaaagaaaagaaaagacagattagcctagaatatgaaatcaatgttagaacaaaagattagattgcatatgcaacactatttaagtgttaaaaattgaaacacagacacttgaggctggttaagggttttttggtaatccattatattttattgaacacctatatgttcaaatgaacatgtattttattgaacaacattatattttattgaacacctaaagcatattttagcattcagggttgtatacaatgtagtttctttctctcaagatgggaaaaagaataatagaaggatattttatgcaagattgagggctattaatttatttcatctcaataaacatttattgaacaataaaacttgtttcttgcccttgagctcacagccatttaagacacctgtgacaggtgccagccactaagggctctgtctgtatcccttgccaacaagattagagtgtggtctgaatgtgatgggaacaactgaaggcttccaaaagcagaggaggagcacatttaaatttatgttttaggtttactatggtgactttgtaaaaatggatttgaggagatgggttaggagactattctagtagtctgaaaaaatatcatgacctgaaccagggtgtaatttggaaatgtagttaactgatttaaaacgtcttttagagatatttctaaaatgttgagatttttttctattaatgtattagtatcagttgcttgaaaaattaaaggatatctagtttgtcttttctatccaagtacttattaatcaaaagtcttacatgttatgaatagcattcccattagtttcagtcttaccacctgaaatgtcttggaaattcccatattcagcaacagaaagtcagtacacagatgacttcaaaagggccagcctgcaagggcactaacttgggagaaaacagacctccttctatactttgtaattaggtacattggcttgggcaattaatctttctcaacctcaatattctcatctataaaatggagatatgccggaattccctggcctgtagaattagtgaggataaatgaggcactgagcataaagcacctgggacaatactagctcactttctaagcaccatttgtttttatttataataaggtactttcagaaaagaaaactatattgtatttggtttactctgccacttgcataacaggacacttgttttgcatatttactgaattttatgtttatctttcttttctttttcccccaaatgttttcctgcagccttataacattaccttgggagcggtaaactgtagtgttatttgataccaacaatatagaccataaacctttcttttacacttttctggagactcaaagaaatttagcaagtaatgaaaaaattgtctaatgggaaatggaagtcatgaaattaactgtgatactgtttgtcatacattaacatcaacaacaaaacatcaaatgtgttataaacactaaggaaagtagttattatgaatttttttttccccaagccaccaccagaacctttgcagaaaggagagaattctcatttaagaaggtttgcttagtcgtcagtccaggaagtgtctttgtaggtatttgtcatctattttgtaggaacctttatggggctaccctgcagaaggttataagtccttctttctctgagtacaatttcttttcttttaggtttgttttctaactgaccttgacagcatttccaacaggcaaaattatgagttgtccctggagaagtgcttcatttcagacccaggttatagtacaagagacataatgaaactagaaaaaaaaaatagagagtcagccaaataaaaagatcattgacaaaaagggactcttgtgacacaggatgcttttaataccagaaatgtgaagactcattttgcgtcgtttgtactggaattttcaacaagaggtgacagagtatgtgaaaccattgttttatctgtgtcaggttctgggttaatggtaaggaaggatctgcttcaggcctgtgatgttgttgccactgctatgaaacaaatgggtaaattaattgagtaattcagcaaataatgaaaaaactgtctaatgatcgtttcattttctttcttgagttattttactcttctttctagagctattttccttgtgcttggtaatactaatttgcagcaaaaatagagtaacacttaaggtaaccttaacacttgaatatggttgaaaagtcggaagaagggaggagagtcattcaagcagttaaaataggtagaagaaaatgtctgcagtaaggcccttttgataaagccaataaacaagtaacaggtttcttggattattgtatattagaaggagcaaattaaaagctgagaccatacatactgaaagtggtagaataggatattaaaacccttacaagtagacataagcacttagcacagcaattagagagctatctgttatccaggcaaaggatcctataaacctcattagctccccaatgacacctctgtgtttacaaccaagtacaaaaattggagttcataatgatgaccctgggaaggtgtaattacatttatctcatgctatacaaaaaggcagagaagaataagatttctctttggatggtaaaaataagagtttgggcaggtacatgaataaatttcgtgaatttggaaagctgactttcatttattctactaatattttctgagcacgtcctatgctctagatagtttctaagtgctggagatataaaaaacagatacaatccttgccttcatagaatgtacagaatagtaggtgaattggacataaatcacatagtgtaaattaccaccatggtaagtgctgctctgggaggacagagcatattgtaacatcatgtttgtggctgatagggctggtgggggaatgtaacttaaatccccaaccaagtgatttagacttaccaaaacagagtgtgacttgagaccgggctgctctgagatgagcattgcatgctccagtctctcaaattctccagagggaaggagagagagacaccaaccgagagtgtccattcctcttctcttcagaaacacctggggtgggaagtaatgtaaaggagaagtgcatggtgctgggataatttataatcctgatcaaggtctttagaagctgtattctctttctttgccttgattttttcatctgtaaaataggcaaacaggggtggcctattgtaactcatgagtttgttgtgagcttcaaatgaagtaattggtgtgaagtgcttaaggatgtagtgattggaaattgtaagccatataaaccaccgctgctacagtggtgcagtggtggttggctggttattattattattactatgaaggaatggtatttatttttgtgtcatgaggttgtaagctcaaagagtgcaagaaatttggtttgttcactgctgtagccccatcggggcatgcgtaggtactcagtaaacatttgttgaataaacgctttgggaaagttagtagggaaacagtgtgcaaatgtttattcccactggtgcatttactgaggccagcgtatcttgagagaacactgattttattgggtatggaatgaagaattatggggaaattaatactagacatacataattttagaatttgaagaattgtagggattatctaatccaagattctatagtggtaagcgaacgtgacccaatagaaggggtgaaaggagatgtcggttgaagatagagtattcactttttctattctttaatttgttttcagacatggtatctatttgatatttcaaataatactggaggaacatttctgggtggttggcaagaagcatgggtgggttaaggaaaggtgaaaaacgctgatttaaaatacatgccagttggaaggtgatgcaacaaaaagttggaaatttatacaaaaatatacataaaatgcaggaaaattaaattacagtaatatagttatttttcacttattcctgtttcagaagccatttgttcttctacctgtgttctagcttaaatatcctttgcagtgcttttcttacgtggcttcacagcagaatttgacccttaggtctacttcctggttgctcagagccttcttgccttccactgtaccacattgtctggctttatcggcttattccatgttttcagctcttcctcgtcataccactccatgtgttgaaccccacaattctatcagagacaaactctcattagtgcttctttttactcttccaaacttcagttactatctgtatcagtgctgccccatagaaatagaatgtgagtcataatgcaacttgacatgtaattgtaagttttctagtagccacactacaaaagtgaaaaactgaagaaattaatttctataatttgtttagcctggtatatcaaaatattatttcaacatatcagtataaaaattgagatcttacattcccttttcatactgtcttggaaatgtagcatgtatcttatttatagtacatttcactttgccctagctgtatcccaggtgcaccatagacaacatgtggctagtggctaccacagtgggaacctgtatgcctgaggctcacaaataccaagtatttgtctttagtccataactttcactgggctctaaacccatgatccagtttcctaggaagcacttcagactcggcctgtctacagctaagcatatcctcttctcttccttcgcccagcctgctcatcctccagtgtttgcatcccatgaaagatgccttcatctacaaaggatctgttcgctgttccccatcattgccagttccatggaccatgtcaccaccgttttctatctgggctatgttgatagcctcctaactgctctttctgccttcattcttgccataacacaatgttgctcacaattcctgcattgttctaatagtctccccaagatattttcatagtttccattgccttagtataaagtgcaaacatgccttattgtatccatcaagggtcatttccctgcctgcctttctgggcttcaccctcccctctctccatttcagctatctttgctttccttcacttctcactctcactattgtctgcctggagcattctgccctctcctcttatgtagcaacattcattttgtccctcagatggttttggtagagaagtctttcactgcccttggcctagatcggtctcctcacatcctccatagctctcatcatttgtaaagccttgtgtttgtcttctttactgggctataacctctgagaagggagggactgggtccaacttttgctctaccatatgtgtagtgtgtagtaaggtacctggcctgtagtcagtatttcgtgaatatttagaaggatgagtgaatgaagacacccagaaagaacacagtattaaagtcctcaggtttaattaacctttactccggcacacgaataacctttggaacatcgcagcttctgcttgaatacctagtgacagaaagtttactaactagaagaacatttcttctttcgaacaagtcattattaaaaagctgtttcattatacatagaaattatgtcttatgtaagaaaatggtttgtaaactttaaaggattacccccctcaaaaataaatccataagatagaggttgtattattctaagtattctgttttaacttgtcattgttgagtttggttaatagatgcatcatgaattttattttccattgaaaaacgatgtattttttttactcttgccaattattgtctacaatagagaaatacaacattgccacctcatttttcattttctgtcttatttacatgggtctgtgtttatatatgttcatgtgcacgtgtgtatatgtattgtctctctctgaaattaaaaaaaaactaactaaaatatccagtgttttccattaggtctcatttgttacacatttctacttttaaattacttctgaaccacagaatctggcaggcctttttggaaggcatttgaggataactactctatctggaatccagccatttacagtatttggaagcaaagaacaaagcaaagcaaattgagattttgttgaatgtttaaaagttttggaaagaacagttaaaaagaaatccttcatggatgcatgctttgaaaacaccaagttttctcaacctttaattttgtgcatctgaaaaccaacttgaatttgtctttaatcccctgctagtcagtggaaagtaaacaagcagaattgctaattctatatggccttggaataatgtttaaaggaacaggatagtttaatggattaattactcttctttacagtattagattcaaatccagcagagatgcaactcttgataatgtgtgtcattcccgttttttctcaagataattcatacgtaattgtctgatttttagaatgtctaaaacctcttgataatgttaagcatgttgaacaatagtagtaatgttgacctcacactaataatagagaagcagtggaggtaaacagatgtggactcaagtcctggctggctgtgggctgtattccagctcctgctaatagcagctaacattcattgagtgctgaccaggtgccaaacaatgcactgggtgatttaggtatgttatctcattcaactttgaggaccatattggtatctccattttataaattacagaggttgagtaacttgccaagtttatgtagctcccagtggagtttgaactccattcctgatgtttagcttcaacgctcatgcttttttcagccatcctgtctctatgttgtttagatttattatctttgtcgttacttataattccagtatttcactatgttagatatacttctaatcatgttttagttgacctgaatataaggaatacatttgagtattttcagaaagtttaaaaaactctagctattaatatttctgaaaatataaacctgcaaatggccatttatgttattttagagagaaagtgggtagaagtttctcttccttgttgtagttaagtcagtcctaaaaagacgaataaggactttggaaccattctttacattttgaataaaacatatgtctatcccccttcctctagatatagcttatgcggtagttgccatttagcaattaatttaaagctatgtcaggaattgtcaccaacattagtcctgcttattatcctcgagagtcaacaaacagtaatacaactggcctcagaatttttttcagttgaaccacaggccactctgcaacctgtctttctatgaagcagttgtaatttaaccccaagattctgaatgtccagacctcaaaaggagaatagtacttattacaccttctttctcctttgcaatttttttcgagtgtgtgtttgtgcgtgtgagtttgtcactgagtggcttttgctacctaatctgaccttttaaactttctcatatacctttaaaatgattcttagggggagtttagtttgccatttaaaggaaattttagttctagtttcagcaaacataggtttgaattgtctgcaaatcacaatgagaaatccaggcttcataacctccaaccccacttcaaacattgatttaaaagaatgaacctaataatattaatgaatcccagggaccaaaagcatgccagtcagaatgggcatcctggggaacaggttaaccagtattctaacctctctgcccttgaagtttaagtacatttaaaaaaaagggggggtcgggggggcggatatcccgctgctgccttgggacttgaatccgtgagatgtaatgagcctgtgtttgggccaaaataaagggttaaaccctcttacttagcagttctttcaatggcacagaaagtgaacttgagataaaataacaaggaccagcagaatgaaggacagctaagttacacctgatcatgaggccatcagtttttgcctgagtcctatagagttggcataatgagtatctatctttgctttgtagttttcagagtttgggctgcttagtaatctttcctgagtttgattagggaaaagatgccatgatatttgatttaataattattgtggagtcagatgaatttcattctgtatccagctaccatattaatctccaaaatgggttatatttttctttccgggattgggctaaaaatctgtccttgtctttaataaactaaagaaagattactttatatctgaagtagttgcattagtaatggagtcattccaggcactttgaagtttctcataccctgtaagagatgtcaattaaccttatagctaaagcaatttctagtaaaaatacagacaaaacgactgaagtagtatttctgtgaaaatcttactgttactgttataaaaatggtgagatttagaaataagataaaaaattttcacagttctttaatgctactgcacaataattgtatgtgttaataataaaggcatagcaggggattagaagttttagtcactgctaatagcagtttaaaaaaatccccacagcaggttcagatatgtgggaacggattatagtgaaagctcagcttagctcataaggggcttattatggatcagcaaaccagagcttcatcagatatgaaatacaggtgtatactcagaattgtttcactttgtgccacttgatacctatcacaatacatgtatggagcactctacaaaaacaacagctcttgaaccaattcttatcaggtgtttataatggctcagggccttgcgcattacaaatttcctataaatgtttgttgaattaaacagagatctgtctgaaatgtaatgctgaccgtcacgcacctttgtcctgagaacatagggccgtgattctgtgtgtgtgtgtgtgttatgttatttatggtactagtttgaactattgtgccgtgtagaaaagccacgtacttcgctatccactgagctctggcgatgtgacccttcatcaaaggtctcaggctctgacgtttgactcctcgtagccatcttcttttgtatcattaactctgttgttatcagtgggactgtcttcagcaacccctccctcatccccccggctggttgctaaacatgtaaaaccagagtaagacaagtcagaagagggcagcagaagagactatgtaaatccagtgtgtgaagttgtgaccgtaatattttctgctcaggagctgttttgcttgtcagttgtttttgactaagttgcaaataggcagggtttgggtatacctcaattataagtgcatgagttatttcctagttttcaagtacttgttctttaaaaataagtgaatatattaaaatagtggtgtttgtatgtatataatgcaaggtgtttatttctgggtagccattgctgcttatgtttgtttgtttttattttttttattgatgcataagagctgtacctatgttgggggtacatgtggtgttttgatatatgcatacaatgtgtaatgatcaaaccagggcaattggggcatttattaccccaaacattcacctctttttatattgggaacattctaattctcctccagcaattttgagctatacaacaaattatatttattatagttgccctactgtgctttcaaacactaggtcttattccttttatctaactgtatatttgtactcattaaccaacctctcttcgtcgttccctctccctacccttctcagcctagataaccaccaatcaactatctccatgagatccacttttatttaagttcccacatatgagtgagaacacatgatatttatctttctgttcctggcttatttcacttaatataatgccctccagttccatccatattgctacaaatcacaggatttcattcttttcatgggcgaataatattccactgttagtatcactttttaaaaatccattcatctgttggacacttagattgattacgtatcacggctattgaatagtttgggctattgtgaatagtgctgcaataaatatgggagtgcagatatctctgatacactgatttcctttacattgctggattatatggtatttctatctttagttttttgaggagtctccatatgttttccatagtgactgtattaatttatcttcctaccaacagtgtacaagtgttcccgtttctcttcatccttaccagcaactgttatttttttttgtctttttgataaaagccattttaactgggatgagatgatatttcactgtggttttatgtgcatttctctgatgcacatacatgatgttgagtatttttcatacaccttttggttggccatgtctcctgaggaatgtctgttcaaatgttttgtccatttgaaacaattggattatttggttttttaaatttatttgtttgagttccttatatattctgattattaatcccttgtttcatggatactttgcaaaaaaccctttatgtgggttatctctttgttgtttcttttgcagtgcagaagctttttagcttgataggatcccatttgtgtatttttacttttgttgcctgttcatttgaggtcttacccaacaaatctttgtctaggccagtgtccagaagcatttccctaatagtttcttctagttgttttatagtttcaggtcttagatttaagttgttagttcaatttaagttgattttttgcatatggtaagagacaggggtctagctttattcatctgcatgtacttactcagtttttctagcactgtttattaaggagactgtcttttttccgatgtatgttccaggcacctttgtccaaaagtgagttagctctattctttttcattggtccatgtgtctgtttttataccagtactatgctgttggggttactatggctttgtagtatattttgaagtcaggtagtgtgatccctccccttctgttctttttgctcagaattactttgactattcggagtcttttgtggttccatacagattttaggattgccttttttcaattctgtgaagaatgtcattggtattttgatagggacattttaatgataccagtaatttccatccacgagcatgggctgtcttccctttttatgtcctcttcaatttctttcgtcagtgttttgtagtttttcttatagagatcttttacttctttggttaaatttattccttggaatttaattttttttgagccactgtaaatgagattgctttcttaatttcttttttaaattgttcactgttggcttatataagtgctactgatttttttgtatgttgactttgtattctgcaactttactgaattcatttactggttctaacaatgttttgatctaatttttaggttcttaaatataccatgttgtctttgaacaagaataatttgacttcttccttccaaattggatgtcatttatttatttttcttgtctaattgctctggctaggacttacagtgaaaggacttttttttcctctctcttttatatttcaaagcttttatagacgttgtatctgagtttaaatcacaagtctatatcaattagttcattatgcattttaagttgtaattatgcagctcatctctaatatgccaaattctcttaaacattactaatgttttataattaccaaatatgaacatagcacttgaccaaaagcatcaataagattgttttaattcttttagacatttctgtacttaattctaaatttttctagggttaatgtttagctactaaaggaattatgtcatctccatcattttagagttgcctactcatcctgctggaggttgtggttgtatatcatctaaagatttaagtcaagccattcattgaattctgacagagcatactgagccttacttaagaacttaaaacagtggtcctttcatcctcttaccctgggaagctaaagtccatggtgcttggaatagctctgtgtctcccttccaggctgatcgtctgccaggtttaacttttcttttaggacagagattgtcttacccatctacctccaaaggctgtaaaacttggtggaatcctgcattctctaaatcaacttccatacttaattcttacagatactaaaataataggaattggaactgaatattttctcatggctttttcttttcagtcacaagtgaaaggacttttttaaaattaaatttttttttcttcaaatactgcaaaagggatgttattgaaaatattttaggtgtttggaaacacttattttgtagtttacaaactggcaccagtgctagatttggccctgagatgtgttttgtttggcccctatgcttttattgttaattaaattaattcctaacttttagaaccaagttatttctgttattgggaggatggaaggatcagactattcctttcagcattattggatttgaattcctgcttgtccagagaagataccctcttggggctcatgtctccagttcactgcattcaccccattccctattgctcctttgtgccgtgaccaagggtttgttgccattcagcaatgggcttaccctgttccatcctgacaactttcttcctgtattttagctgcataacccctataatcatttgatttttgacctgatttttacatgaataaaccaatcctagataaatcattggaaaacttttacaccactggcaaaatgaagtgcatagtaagatttcatcatctctactatttaaaaataaaaccattatgtacttttccttttttggaaataacatttttaaaaatcccataacatttagctctttaaatattttaccattgattatctgtctgtaactacatagtccaataaaggggaaaaagttgataactttagtgattttcttctaagatagttattaacactgtagaaataacaggaatttctgaagggaaaatgagttttgtgagttacattatagtttttctgttccttgtaatgaagggatgctttcctttttgagaacaaatcctattcctaaataataacaataatagaagagtcatatattgtgctaactctctatgacctgtacatatagcattaatccacatagtacattaatgagacccgttttatttaatcccaatgctacaaatagggaaaaacttaggtatgtaaagtttaggaaaccttacactggatcacaaaactagtgagaaattcaagatacaaagtgcaggttttctgtttttatgagcacttaaccaacatctataccatttttccaaaattaaaagtagaaacaccctttattctacgtcctttcccaaaaaaacaaaaacagaaagtgaagtcccattttgtatactgaaatcatcgcattataaatgtgctaatgaggatatggattttctttgcctgaaatgttagcttattttagaaatgtaccatatatttctactcatccatagaaacatttttaagattaatattcctttcagttgttaaaagatagccaaacctgcatatttaccccatcttgaaaccaaagcttattagaccaaattaaatcattttaacaaaatagataaatgtttaaacttagcaccaaatcttgattgttaaatatatttgaaactcaatgcattaataaaaagaacttttcttctttatgtttcaactttgtagcatccctgcttaaaatttgataaaccaatcctaaactgtaacttctatgtcagaagtggtattatgaatgtcaggaataataaaataatcagaatgccatgtgaaccaacagtcaacttgacttaggtttgaaagggaagaatattctaatcacatgttcattttgaatagtttcttatttttaaaagtaagatatccttattgtagaaaaaagaaacaatgtcacctcttcccatgccactgaaaaagaggaaacagcaggtattggcatttgatatatttcctcatagacttttttcctgtgtgctttaaaacaacaacaatgtgtgttatcatatttccatatatttttgtattctgccttttttctccataatattacagtatgaaaacttcgtggctgggtgtggtggctcacgcctgtagtcccagcactttgggaggccacagtgggaggatcacttgagcctaggagttcaagaccagcctgggcaacatgggaagaccccatctctacaacaaatgtaaaaaaaattagtcaggcacaatggcatatgcctgtagtcccagctactcctgaggctcaggcaggaggattgcttgagcctgggagttggaggctacagtgagccgtgatcatgccactacactcagcctgggcaacagagtgtgaccctgtctcaaagaaaaagaaaaaaacaaatcaaaacttggcctaattatgtttttatatcattttaatgattaggtaatacatatgattcttaatccacaaactaggctatgtaagatacctgtacttgctttcatccaaaatctagaaaactctgttctgtcaggttagggagagggatgttcaatttctcagctgtagcttacttctcctggggccttgcaaagattccatggtgtgtgtatatgagggtcttaacatagcactgtgtaggcccccaattatgctctcgccactaaagtccccattgtccaagccgccatttatcccatttatccaagttcccatttatccaagttcggctaaatcataccaatttagctgaacacattgggcactttgaagtccttgagatcctttggagtttgatggctccatgtctttggagccctcctgggcatgggaatcctgtcagatctgtgacctctggagctcggggctctgcctgcataatcctagcatgtagccctttttcctagagtgccgccactgccttaggtcttccctattcttaacacagatagctttagtgctgccattatcctgcagctctcaaaggcatgcttcccttgccacccgtaggaacacttgttctgatcccttctaggagcacaggctgccagaagatgtcgggaaatcaggttgtctgtgagggacggctctctctgactctctgagacactatcactcaaggcaagagagggaaatagcatgcttggcctttggggagaaaaggaattagaggaaggtcacaaaacaaaaatcaataacttcatacgttattcaatctcagttgcatagtatactgtggttttgcatgatatacttgggtatactatggttttctaaccattccattttctctgacaactgtttttttcattgttttctgtgttgtaaataacactacagtgaaaatttttgtgtataaacatttttctctatgattttcttaaagtctcagaagtagcgttataggttacaaagtttttttttttaattactttttagacacatagcaaaaatgttctctaaccctgaaattgaaaactgactagaacattcgagggggtacagctgtgtagtgaggagggcagcctgtcaaatcattttctttttcaaatttttaaaaataatgaatattcaagcaattctaatattactttaaataaattttaccaatttagccgaacacattgggcactctgaagtacttgagatgatgctctcattggatgattcaatggctgctgttgtgtccagactgaacagtagttcttctgcaggcgatcactcctgtagttttacctgcttgggatgtggcctccatctgcgcatgtctagaaattttctcattacgagaaattcctatttagttaaacatttgtttagtatttatttcagttctttcgcaatcatctactttgtaagtttacatgtctcatagatgttgataaataaatacagaagtcaatgatcaaaattaaatggtacattgttaacatccaccagctttaatccagctataatgggaaagaattagaatcacttggtctgttaccagttgttatgggctgaattatcttctcccaccctgactcctgccccaattcatagattgaaatcctaacacctaatatatcaaatgtgaccttgtttggaaataaagtcatcgcagatataattagttacaatgaggtcatactggaatagagtggcccctaatgtaatataactggaatctttatacaaaggggaaattgggacacagatacccacggagcgagaatgtcatgtaaagatgaaggcagagattagagtgatgcagcagaagcccagaaggctaaagattgccacagaacaccagaagcgaggagagaagcagggggcagattctcccccataactctcagaaggaacccaaccctgctaacatctcgaactcggacttctagcctctaaagtagagagaataaattctcctgtagtttaagccaccttgtttgtggttctttaaggcagccctagcaaactaatacactagttcaagaatgttttaagataatctgtttgatagctacagacactttttttaaccttttacattggttgttccttttctttgccatctagaacatattatggccacatcaatgccagaatttgttgtgtgtacttcctcatttgtgtaagtttttttgtttgtttgtttgtttttgagatggagtctcattctgtcactcaggctggagtgcagtggcgcgatctccgctcactgcaacctccacttcccagttcaagcatttatcctgcctcagccttgtgagtagctgggattacaggcaagtgccaccacacctggctaatttttgtaattttagaagagatggggttttgccatgttggccaggctgatctcgaactcccgacgtcaggtgatccacccacctaggcctcccaaagcgttgggattataggcgtgagccaccgcgcctggtccatttgtgtaagttctatagccttgaaagatgctttaagcaaatttttttgtgtgcttttgtactttctctaaatcaaagcctgtctcattttatccataaatgttcctagtattcttcataatttttctgaagacttctgtaatctttatgctcaagtcagttacggtacttcatgacatctggttgttgggaagtccaccttattgtctgtcatattctccaaagttatttcaacttcacaattcgttttctaattatcaaaccatattctcagttgaaaataaattttaaatttatttttaaatagattttgtataattgaaagtagaaataacatggtttttgtccagtctttccaagctagttttaagaaaaagctagttttgcaggctttctaggactagccttgaaatggctaattccagcttttttattcccagggactagaactggtccagcgggcagggtcctagacacagtctgttcttgtgacaaaaacttgtctggctcactttgaaacaactcttgcactaatactgccttgcttttcttgattttatatcagctaggggtaggttcagttatagatacaaaaaaaatgtgtctctcatgtagaagaacctaggaggtgactgtgtgggactagcatgtgggacttggcataatctttggagactcgtggtccttccaacttttcattctccaatcactagggagattttaaggagactttctggaagttccaggagatagctgtgcttatatcttattggctagaacttagtcacatggttatatctagctacaaaggaaactggtaaatgtagtcttttaggtagtcagcaatgtgcccagcttaaaatcagaggtttgtttgtttgtttgtttttcctaggaatgggagactaattattagagatcagttgatgatacaaaaatgagaacttttctagtttttcataacatagaaaggttttcttttcttggtttttattttttctgtggcccagactggagtgcagtgtcattgtgtgatcttggctcactgcaacttccatctcccgggttcaagcagttttcccaccttagcctcgtgagtagctgggaccacaggcacatatcaccatgcctggctaattttttttttctttttttagtagaaagggggtttttccttgttgcccaggctggtctcgaacttctgtgttccagcaatctgcccaccttggcctcccaaagtcctgggattacaggcttgaaccactgtgcccagccagaaagttattttttatccagagtgtgtgtcttgttattttttaatgaaaaatacacaaagttaaaacacatggaaaagtagggattttatgtatagccttatgtcgaaacacatacacatacacactctaacacaccctccaaaagaactctttggaagaaaatcaaaaccttgtctaaaaccaaataaaattgatattccataaagatgtactacttgtatcccatgactacctctaacactccattgcaccatgtgctctttgtaacaccagtatcttggtgtgggaggcaaggctctaaggttacatggaaatattacccttgtcttgctatgcatgtgagatgttttgactaagatgctttgcagatgttagcataccaaggacagtctggtagccattttggtacggagcatcttgacacaaataaaaaagcaaaagcaaacaaacctctcagagataactattgctaagaaatgtttgtgcatgttctcccaaacttgataaatgggagggacgtatattcatagagatattgtctaagtattagggaaaaaagacattcccagtcgattgtacatcaaaggttatatcataatggtttaaattttaaaacaaaaaatgtcctcctaaaagattgaatccatttacgttaccagaggtagtgatcattataagtactataatctcaggcaaaaaagtgatgtagttattatttgcagttatttgttgccatgattatatgcttgcatagatttattgaacatatttctttttctgagttttatttagatataattcacatactatacgattcactcagtatagaattcaatgatttttagtgtgttgattatcacaatacttctttttaatagttttataaagatattttgtattaatactattttcaagtttgtaagtatctttagtatttctgctttcagaaaattctttccaattcagagtttatggaatgattctcctaaatttccttttaatactcttataaaccatcaaacttttagaattttttaaagcaaataatgtataaagcagatactcttactgcacctcttcaaccttgtgagatggagctgtgaagaagaatgaatgagcaccaaggtgagagttgagtttttcttattattcagtaataagagatggtacttggtatgtgacaagttcacttgtcctctgtaagattttatgcttcatcttatcacaccctttgttcatctggatgtgaaacatcagaatatatagatactatctctcttcaccttgtcaccacttctctttagtaggaagcttctttctgtttccaaaatgaaagtctatgcatatatatttatggaaatggcagtttttcataggatttgtagaatttttacataagtgtagaagaaaaagttcaatttaaactgtactttgtggatatatactttatgtaactttcatcctgggaatacctctgatatgtaagttttctaattgatgtgtctttacttttttgaatcaggagaattaccttggccattaaatgtaatatttacacttgaaaggcattgttgcctctttatactgcaccattatgttgatggatgtagccctgtgaggggatttttcctaaactcttgctctgcaaattcttttcatgcttgggaaatcttttttcatattcattttagtttttcgtttatcccacctgctgcttttttcttataagaagaaaatgtcaaagatttctaggtataacttttactactagcaaaatgacatattttttttccttttgcacttgtcaagtaaccttatggatgacaaagtttgggattagatctattgacccattttggacaatatatgtatttcctttatatactgaattagtccatttgcattattataaaggaatacttgagactgggtaattttataaaggaaggaggtttaattggtttatggctctggaggctgcacaggaagcataatgccagtatctgcttctggtgagggccttaagaagcttaaaatcaaggcggaaggtgaaggtggagtaggtgagtcacatggcaagagctggagcaagacagagggggaaggacccagacttttaaacaaccagatctcatgtggactatctcatcgccaagggaatggtgccaagccatttatgaggggatccgcccccatgatccagacaacctcccaccaggccccaactccagcactggggattacatttcaacacaagatttggaggggacagataatccaaagcatatcatatacaacgtgtgtaaacctttgaatataaagtcaaatgggagaataacagtgttagagtatttcacattagtgcgaaacataggcctacaggttaaaagtgtgtgacatattctttagtctttatttattaaaatcagtgaaagaaaaatatttacaggatataaaaagactacattttaatgtctaaattgggttgcccctgcttgtcacaggaagagggttgttttctaggatgctacaatattggcaaggagagagcctgctgggacctctgtgaatcactgggctataaatcgataaaatagagctggttatttcatcaggactttggatggaccagttgtgcttctaaggctgtaattcatagtgtgtgtgggccagaggcgtcgtcaattgtgaaacctcaacttgtgtggtttgtagatgcctattgagaatgaattccaacctgacgtgtattgtggggctttcattaggattaattagttactatttgctgagtcttatgaagacaaaaacagtgtcgaggtgttaaaaggcctgttatttttttctacttgcattaacaccaagatattttctagatgagagattaaaccttagaaacccccagttgaattttcaactcattcattttttaagtacttatctccaaaatagcattgcagaaatgttgacattgttgtagtgcagcctccctggctggtcagaaatagataccaggggatcattggccagacatggaactgctcaagtgattagagcgaacaacccattcaacacctacttgtgacttaggtttcaagttaaactaacatgtttagttataacttctccagttaacgattaaagttcatggaaaaatcactccgtatttttaactgagcgaattgttgcctttagaattgttcggaattcaagtccagcctccatcatcttgggcaaattgcttaaacgttctcaactttagtttccttacctataaaatgtagaaagtcctaataacttaaagtttttgcaggagttgcatgaagctgttgtatgtgaatgtctacatggtggatgtttagcaaatggcagttgtcctttttcctttttttattacttaaaagcattaccatttaacaaataactcttgtaatgaaaaatatgtactgtggaaaaaagggcagtgaagttttagaaggaaacaaaaagtgtagaatctgtaaataatgtaaatgaaagaaatcctaattgttctttgaatgacttagaaaatgaagatgttccattttagatgatttgtataaaattaggagttaggggcttaagtgcattgtgtatatatatgtgcatatatgtgtatatatatgcatgtgtatatacatatatattcactttagtgcattctgagattgaatcagtggcagagaaagaacagaaaaagaaagatgcataaaagataaatacacaacactcatggttcttacattggaaaattctgtagaccttgtgcccttgggggttgagggatatcaccatgctactccattcaccagggcccctatgtgccctggagtctcacactcaggctggtttcatcatgtatgtgaccagcttccagacccctgaaggcttttgcaattttgacctatgattgaccttcctcgcaccatcttattttctagtttttaaaataattttagaggttttagatgtctacaatggtaatgaatgaaaggggagaaaataatgtagttttatcatcaagaaatctagcagaagtatatttggagactcagtgaacctgcacattgaagtctggctttgaaatcaccaagaattcatctggactcagaaagccctgggttagaatttatccttcaccatgtactggctgcgaggctttgaataaattctttaagccagcacagccccaggctcattggtggtacttaacctgttattaatttcttccctttgttaattgagagttgaatacagttctgtattaatgatgacctctttactaattagaccaaaggataccaatgtaagaatctagattggctgggtagataactcctgaatacagaggagaggacaagaagtttggttgctgttattcaggagaggtcttttgaggggggcatggtgaggtctcctctgattccttttatgccaacctgagttggttaccatttctgtttctttggcaggggaagaccaaggaagatgctaggatctacttgaaagtcagggctttggctttgtatcttttctcccttttgaacataattgtgtccaccttgtaagaatgagaatttgtgaagttttcatgtggggagcagatctgtcttgtgtcacatgaatgcctttctttcccctacgcataccttcttcccatgctgattcctcctcctctacctccttcccctctcctctgcattgggaaatagaatctgcagccatttcatgccactgtactatgtgggtttatgctgctacaggcaaagagggcagtagaaggatccattcctcccacggctgctgccacctctttcctcatcactgcagtcattggtttagcaaatggagccttggctacaaatggcagagtcctggcagcaagccggtgttgaagttaaacccagagctcctggggccctctgttgcctctggaaatggacaagctggggcatagtattaaggcaacaaaagacaactgcaaagactaaaatccccccatgaaaaggaagaggctttaagggctaagaataggaaagcaccttgccattaatatgcaggtgcacatgatgctgtctggttaagctgtatagccctgcatgtaggtcagagggtgtatgtgagagggcagatataacagaacctgagagattaaagccaagcaggttaagtctgtgctgagagatgagaccaaacaatttcatctcagcttggtagtagtattaatatgtcaaccactagcaagaacaacaatttgcatttgcttgctgtgacagcatgcacccactcttgttcaagccctttgttcaagcatatgcactactgttccatcactcttatcacttcctttagtaaaatcattaggaggtcattgcagagggactttgggagctccagtgcctggatgttatcaactgattactgactatggggaagaacaggcattccatacctttagaggtgctccagaacacacagttgccacagtaattgtccccaggatccgattagggtttctttttgtttttgtttttagattgagactgtataaggttgaactcgcatttcaggattcacttatcctcaaccaaggtagttacatatccttaattttaaactgtacttttaaaacctcccctccagtttttgatgtttcagaaattgaaatatttctttctgtcaataagaacataatataggtttctttttttccagacaaatcagtgctgcattgtaccactaatcatgacttagaattgaggaaataagatatttttatttatattcctgttgagctataccaattattgaagattaataccctaacccctctcacatctttttccaatttaattttaatttctccccattatgtaacgtgtacttacgtagatctgaaactctagaactgaataatcaaaaataattcttattcaaccgtggacttttcttggatggtatatccataaagaagaattttaagtattattttagatcttttaaaattatgtttttaaagtatattttagtggtatttgtattactgagctctttgaattttccttttctattaatttacacagcagattaattttttgggaaaaaataaaaatatttagctgtgagaattagacaatggaatacctaagccctgtggcacaagcttccttcatgaaaggaagacattgttagtagtggtgaagcttcaccatcacaaaggttaactctgtcgtccttgtctctaatgtatcatttaaatttatatgttatgtaaacagttggtgtcaaaatcctgcaagccctaaagaaaaaaaaaacttgaagagttggacttttaaagattgacaacttgcctactattaaaacaataaaataatgggcaataataaaacactagtctggaccacctctagctatgtgtcaccttttccttttctctgaagaaagctctcaccttggaacactaacatgggcaactttaaactttacaaatagcttatacagatgcttcaaaaatatttattttttattttttattttatttatttatttatttatttgagatggagtctcgctctgtcgtccaggctggagtgcagtggcatgatctcagttcactgcaggctccgcctcctgggttcatgacattatcctgcctcagcctcctgagtagctgggactacaggcacctgccaccatgcccggctaatttttttttttttttttgtatttttagtagagatagagtttcaccatgttagccaggatggtctcgatctcctcaccttgtgatcctcccgcctcagcctcccaaagtgcttggattacaggcgtgagccactgcacccggcccaaaaagtattttaaaatgaaacatctgtagtttttaccccaacctgcgtccattgatcttgctggttgaatttcatgttaaaattgaataataagttagcaattaagtatatttttggggatcaaattattttgtctccaaacatcttaacaatcttgtgattcagtgaacaaaattaaaaacttacagaatctgataaatgcatccaaactagcacacgtctgtgtgtatctcctacttaatggaaaaaataaaacaagatattggataacatctactgtaaggattcacccccagatatactgaaggataatcaatcatttgattacataggtaaggggaggtatgtggttttgttgatacagtcattggggaaaaacttaccatttgctaccggctgtgtacccaacagtaaaagtagaagtctgggttttctctccctggtgaataaattatgtatgtttaaatctgttttgatcttaccctttttatgcagtaacgcacttggtagatgataatcacatgtatgaaatacctctactgtcaggagagaatactaagatttcaagcagtgttactgcacattaatgtaatgtcataacttcatgctagccttacatccatttctttctcactgacctacaacttacctagatgttgaggcaaacaacagggacaaagtactagagattaaaaaaagagagaagttaaaacacacatacacagaggctgctctgcaactttagttactttgcttatttttctcccacgttttgtaattttggtgaattgtaatatgtagtatgtaaggacatcattttgcagatgaggatacaaggccaaagatgtcttgctcaaagttatgaagctatttgatagcagaactgagagaactttgagtgatgaaaatgtgtgattatttttgtactctccccacaccacacacacacactctgtctctctctctctctcattctctctccctctctctctctctgtctctccactatgctccttgcttagttatagcaacagatctcatgatgcttgtattagagaattttcatgataaatttatggttatacgaataatccagtcatttgtagatatgcctctaatatgatattggttttctctctcatgcccatgtaatttgtaaagcaatgtttgacttttgtcacagatattttgctatgtctttaatttactggtttgtggcagtgaacaacaaaaagatttctacgatacttgttaaggcaggcaggatgattcttccccccattcccagcttttctgagatataatggataaaaattgtacatatttaagatatgaaatatgttttgatatgacatgagtaccacaataaggctaattattatatccatcacctcatgtggtaatcagtttggggtttttttggtggtgaaaacacttaagatttactctcagcaaatttcaagtatataatacagtattattaactgtagtccccatgctgtatattaggttcctggaacttatttatcttataactgaaagtttgtactctttgatcaacaactccccattttcctctccctgcagtcttgccaaccactcttctactctctgcctctctgagtttgcagcattattcacagtagccaagatatggaaacaacctaagtgttggtcagtggatgaatggatgaagaaaatgtgcaatacagacacatacacacaggaacacacacacaaacacacacacacacacacacacacacacacacacagaggaatattattcagtcttaaaaaagaaaaaagtcctgccatttgcgacaacatggatgaatctggaggatgttacataaaatgaaataagccagacacagaaagacaaataccgtgcgaccttatttatatatggaatctaaagacgtagtatggctctttatccagttaaggatgtatagtctttctcaggttgatgctgttttctctggttaatcatggagcatataggaagataatgtgatggtggtagatgatggtctcaccagctgcttgtcatttgcaccaggatttagatttgttcttggtggaaacacctagagggcagaggtgagaaatttgtgaaatggagacagatacaaacattttagattatataaggcttagaaaagcttgggattgaagactctttaaaaatgagatagaggggaggagccaagatggccaaatgggaacagctccggtccacagctcccagcgtgagcgacgcagaagacggtgatttctgcatttccatctgaggtaccgggttcatcgcactagggagtgccagacagtgggcacaggtcagtgggtgcgcgcaccgtgtgcgagccgaagcagggcgaggcattgcctcacttgggaagcacaaggggtcagggagttccctttccgagtcaaagaaaggggtgactgacggcttctggaaaatcgggtcactcccacccgaatactgcgcttttccgacgggctgaaaaaacggcgcaccacgagattatgtcccgcacctggctcggagggtcctacactcacggagtctcgctgattgctagcacagcagtctgagatcaaactgcaaggctgcagccaggctgggggaggggcgcccgccattgcacaggcttgattaggtaaacaaagcagccaggaagctcgaactgggtggagcccaccacagctcaaggaggcctgcctgcttctgtaggctccacctctgggggcagggcacagacaaacaaaaagacagcagtaacctctgcagacttaaatgtccctgtctgacagctttgaagagagcagtggttctcccagcacgcagctggagatctgagaacgggcagactgccacctcaagtgggtccctgacccctgacccccgagcagcctaactgggaggcaccccccagcagaggcacactgacacctcacagggcagggtattccaacagacctgcagctgagggtcctgtctgttagaaggaaaactaacaaacagaaaggacatccacaccaaaaacccatctgtacatcaccatcatcaaagaccaaaagtagataaaaccacaaagttggggaaaaaacagaacagaaaaactggaaactctaaacagcagagcgcctctcctcctccaaaggaacgcagttcctcaccagcaacggaacaaagctggatggagaatgactttgacgagctcagagaagaaggcttcagacgatcaaattactctgagctacgggaggacattcaaaccaaaggcaaagaagttgaaaactttgaaaaaaatttagaggaatgtataactagaataaccaatacagagaagtgcttaaaggagctgatggagctgaaaaccaaggctcgagaactacgtgaagaatgcagaagcctcaggagctgatgcgatcaactggaagaaagggtatcagcaatggaagatgaaatgaatgaaatgaagcgagaagggaagtttagagaaaaaagaataaaaagaaatgagcaaagcctccaagaaatatgggactatgtgaaaagaccaaatctacgtctgattggtgtacctgaaagtgatggggagaatggaaccaagttggaaagcactctgcaggatattatccaggagaacttccccaatctagcaaggcaggccaacgttcagattcaggaaatacagagaacgccacaaagatactcctcgagaagagcaactccaagacacatgattgtcagattcaccaaagttgaaatgaaggaaaaaatgttaagggcagccagagagaaaggtcaggttaccctcaaagggaagcccatcagactaacagcggatctctcagcagaaaccctacaagccagaagagagtgggggccaatattcaacattcttaaagaaaagaattttcaacccagaatttcatatccagccaaactaagcttcataagtgaaggagaaataaaatactttacagacaagcaaatgctgagagattttgtcaccaccaggcctgccttaaaagagctcctgaaggaagcactaaacatggaaaggaacaaccagtaccagccgctgcaaaatcatgccaaaatgtaaagaccatcaagactaggaagaaactgcatcaaataatgagcaaaataaccagctaacatcataatgacaggatcaaattcacacataacaatattaactttaaatgtaaatggactaaatgctccaattaaaagacacagactggcaaattgcataaagagtcaagacccaacagtgtgctgtattcaggaaacccatctcatgtgcagagacacacataggctcaaaataaaaggatggaggaagatctaccaagaaaatggaaaacaaaaaaaggcaggggttgcaatcctagtctctgataaaacagactttaaaccaacaaagatcaaaagagacaaagaaggccattacataatggtaaaaggatcaattcaacaagaagagctaactatcctaaatatatatgcacccaatacaggagcaccaagattcatgaagcaagtcctgagtgacctacaaagagacttagactcccacacattaataatgggagattttaacaccccactgtcaacattagacggatcaaagagacagaaagtcaacaaggatacccaggaattgaactcagctctgcaccaagcggacctaatagacatctacagaactctccaccccaaagcaacagaatatacatttttttcagcaccacaccacacctattccaaaattgaccacatagttggaagtaaagctctcctcagcaaatgtaaaagaacagaaattataacaaactgtctctcagaccacagtgcaatcaaactagaactcaggattaagaatctcactcaaaaccgctcaactacatggaaactgaacaacctgctcctgaatgactactgggtacataacgaaatgaaggcagaaatgaagatgttctttgaaaccaatgagaacaaagacacaacataccagaatctctgggacgcattcaaagcagtgtgtagagggagatttatagcactaaatgcccacaagagaaagcaggaaagatccaaaattgacaccctaacatcacaattaaaagaactagaaaagcaagagcaaacacattcaaaagctagcagaaggcaagaaataactaaaatcagagcagaactgaaggaaatagagacacaaaaaacctttcaaaaaattaatgaatccaggagctggttttttgaaaggatcaacaagattgatagaccgctagcaagactaataaagaaaaaaagagagaagaatcaaatagacgcaataaaaaaatgataaaggggatatcaccaccaatctcacagaaatacaaactaccatcagagaatactacaaacacctctatgcaaataaactagaaaatctagaagaaatggataacttcttcgacacatacactctcccaagactaaactaggaagaagttgaatctctgaatagaccaataacaggatctgaaattgtggcaataatcaatagcttaccaaccaaaaagagtccaggaccagatggattcacagccgaattctaccagaggtacaaggaggaactggtaccattccttctgaaactattccaatcaatagaaaaagagggaatcctccctaactcattttatgaggccagcatcattctgattccaaagccaggcagagacacaaccaaaaaagagaattttagaccaatatccttgatgaacattgatgcaaaaatactcaataaaatactggcaaaacgaatccagcagcacatcaaaaacttatccaccatgatcaagtgggcttcatccctgggatgcaaggctggttcaatatacgcaaatcaataaatgtaatccagcatatgaacagagccaaagacaaaaaccacatgattatctcaatagatgcagaaaaagcctttgacaaaattcaacaaccattcatgctaaaaactctcaataaattaggtaatgatgggacgtatttcaaaataataggagctatctatgaaaacccacagccaatatcatactgaatgggcaaaaactggaagcattccctttgaaaactggcacaagacagggatgccctctctcaccactcctattcaacatagtgttggaagttctggccagggcaattaggcaggagaaggaaataaagggtattcaattaggaaaagaggaagtcaaattgtccctgtttgcagacgacatgattgtatatctagaaaaacccattgtctcaacccaaaatctccttaagctgataagcaacttcagcaaagtctcaggatacaaaatcaatgtacaaaaatcacaagcattcttatacaccaacaacagacaaacagagatccaaatcatgagtgaactcccattcacaattgcttcaaagagaataaaatacctaggaatccaacttacaagggacgtgaaggacctcttcaaggagaactacaaaccactgctcaaggaaataaaagaggatacaaacaaatggaagaacattccatgctcatgggtaggaagaatcaatatcgtgaaaatggccatactgcccaaggtaatttatagattcaatgccatccccatcaagctaccaatgcctttcttcacagaattggaaaaaactacttgaaagttcatatggaaccagaaaagagcccacatcgccaagtcaatcctaagccaaaagaacaaagctggaggaatcacactacctgacttcgaactatactacaaggctacagtaaccaaaacagcatggtactagtaccaaaacagagatataggtcaatggaacagaacagagccctcagaaataatgccacatatctacaactatctgatctttgacaaacctgagaaaaacgagcaatggggaaaggactccctatttaataaatggtgctgggaaaactggctagccatatgtagaaagctgaaactggatcccttccttacaccttatacaaaaatcaattcaagattgattaaagacttaaacgttagacctaaaaccataaaaaccctagaagaaaacctaggcattaccattcaggacataggcatgggcaaggacttcatgtctaaaacaccaaaagcaatggcaacaaaagccaaaattgacaaatgggatctaattaaactaaagagcttctgcacagcaaaagaaactaccatcagagtgatcaggcaacctacaaaatgggagaaaattttcacaacctactcatctgacaaaggactaatatccagaatctacaatgaactcaaacaaatttacaagaaaaaaacaaacaaccccatcaaaaagtgggcgaaggacatgaacagacacttttcataagaagacatttatacagccaaaaaacacatgaaaaaatgctcatcatcactggccgttagagaaatgcaaatcaaaaccacaatgagatatcatctcacaccagttagaatggccatcattaaaaagtcaggaaacaacaggtgctggagaggatgtggagaaataggaacacttttacactgttggtgggactgtaaactagttcaaccattgtggaagtcagtgtggcgattcctcagggatctagaactggaaataccatttgacccagccatcccattactgggtatatacccaaaggactataaatcatgctgctataaagacacatggacacatatgtttattgcggcattattcacaatagcaaagacttggaacgaacccaaatgtccaacaatgatagactggattaagaaaatgtggcacatatacaccatggaatactatgcagccataaaaaatgatgagttcatgtcctttgtagggacatggatgaaattggaaatcatcattctgagtaaactatggcaagaacaaaaaaccaaacaccgcatattctcactcataggtgggaattgaacagtaagatcacatggacacaggaaggggaatatcacactctggggactgttgtggggtggggggaggggggagggatagcattgggagatatacctaatgctagatgacgagttagtgggtgcagcgcaccagcatggcacatgtatacatatgtaactaacctgcagaatgtgcacatgtaccctaaaacttaaagtataataaaaaaaaagaaaaagaaaacagcttaactagaacacatattcaaaatttaaggttatttatataatcactaaaaaaaaaaatgagatagacttaatttcattctttttaaaaaaaagctttttctgcagatctattaggttttcatttttgaccataatatttttctttcatttctacatatatttaaaataatgcctacatgatttaggatgtattttcaaggaaaattaaaactgaacatcatcttctttgagatcttttggcttattccagcatttatcatacaaattctcatactccctctctgtatcttctttataaccataaccagttgtatttttttaatgtagcttctgacctttttataagttgttcaaaataggtacaaagcaactgggttttgttatatttagttgggatattgcggatatgaagaaaacaaaatggcattgtcttaatttttatagctaaaaaattttaaggtagtcttttttcttttttcttttttttctttttttctttttttttttgagacagagttttgctcttgttgcccaggctcaagtgcaatggtgcgatctcagctcaccacaacctccacctcccgggttaaagtgattctcctgccacagcctcacaagtagctgggattacaggcatgtgccatgtcttttttctactctaacttttatgagaatctttctaatgcatgggttgaacttctagtgtcttaagtgaatacatttataagttttaatgaaactgtgattttccattaaaaatactgatggtggcctgggcacagtggctcaagcctgtaatcccagcactttgggtggctgaagcaggtggatcgcttgagcccaggagtttgagaccagcctgggcaacatagcgaaaccccgtctctacaaaaattagctggaaatggtggtgtgcgcctgtcatcccagctactcaggaggcctaggcaggaggatcagttgagcctaggaggtctaggctgcagtgagccatgatcacaccactacatcccatcctgggcaacagagcgagagcctgtctcagaaaacaaacaaaaaacaacaacaacaacaaaaaagaaaaaacaactaatggagggcatttaatttttaagtggaatgttcaaaaccaaaatgtatgctctctaaaataatgagaagtataaatatatagtataaaattggagtcagatctataaatagaataaaaacctatataactgagcataattttggctaattataaaaatttcctccttaaaagaaattgcaaagagagcatttcagatatacctattcttatttctcaaaatgttcacagataacttattgattcttatttctcaaaattctgtaacagttggtgtttgtacgtaattaatgccttatagaaagttgtattcagcaaatcaaagctacctttacctgggttgtggcttctcggaaagtaaataatctaaatttctccttaaataatacacagggaataaatataatacatgttccgcataaatatataaatatactttattatacataactatacagtgcatataaaatgaaagcataaacaaaccaaaattattcagttataccacagatgaccactatattatatgtatttccttacaatcctgtgtgtgtatgtgtgtgtactaacacattgcatataagtgagaccatgtttcatattacaattattttctgctattttgcttagcatatcgtaagcattttcgatatgaaaaaaattgtattaattgaaaatcttaaatcctatgtcatgttttacaacatgtttttctacttttaaccattctagttggcattattggttttccctcatataacttctataatgtgcaaatatgcatattatagaagtctggtctgaattctgaatctttaaggtgaattccaaaaacggagattgtaagaaagatttttggaagtatatatcacaaaactgttttcattactgcaatacaatttacattactgtcagcattgtagaaattgtattttaccatattctcatgaattttaggaatttgtgataacattttgcaacttgaaggtttattgtagtgattgattcatataaggcccctaaaggaaatttccaaaattctttggctaaagagtttattctaatttttcaaacagaatacgtaagtctttagggtatgtaatgccagctaagccaaacagcgttttattctgttgttcataaatacttctgtttctttagaatgtttgtcagaagaagtgttttggataattaagtctaaaaaaactaatttgcagagttacatgaatgcaaaacattctcataggctacatcaagaaaaatattcagagggtgtaaaatcttgcatcctgagagcatcgttgtgaagaaacattggttttggttagacagagagtgaggggttcagagtttctcagagaggtttatttttatcttcttcaagtttcatttaggagttaggaatactgagacaacttaacatagtaccttggagttgatgccacagatcattttgcatgacaggtgtgtacaggcacagtgacagcttccaaccaccaagagtggctgtggtttgccatggaatgaatgtctacataactaagagctgagtatgctcaaccatgggaagaccctactggactttgtgagtaactggcggatcaaagtggctgaacagtgagccgtcagtgtaggaggagatggagtgctggcccaaactattctggtcccatgacatactgcaaaagctgtttttaaaaaatgaactattataacatctttgatactgtcaaaacactggttatttgagacttctatttgcctgaattataaataagagtgtttgactttaaaaatacatgtcatttattgtataatgttcgtagaacatgttttcggtggtaggattttgcatcatgttcatgatataaaactataaacatatttatcatgttaaagttcattgtgtaattattggatgtgtgttttcttagttatgaggatattatgattattttgatatcagaaatagatgtagaatttgcagctgtgataaatgaggtgtaatggaagtctttcaatttcaattttccttttaaaatcttctggattattgggaagtcagatatttacatttcacttcagaaccaatgtagacattagatacttcaagtgaagttatcctttctaggaaattacaaaactgtttgcaagtgattattaataacatcaggatcatatttaaaatatggacacgcatgcagttttattcaagtactgtattaaaggcttcacttactcaattttcattactgtatatattgtaaaatataaatgtaagatataattttacttaaaataggccatttaatggtaaaaacacctgtaaaactatgcatagcaaatgcacagcacctttccgatgactgataataaagctctcaaatgcaaagagttctaatattttaagcatagttatatatctaaaaaaataataatgtttttcacagaaccagaaaatggccaagtttaatactgtactaaaaatagcataacttgcatcagcaactgtggatttctggtgaggtaaggaaaggtgggtgctttctctccctcttgtcatacttgctcatctctttcatttctacctcaaagtatgcgatcatatagcttttgaagatctttccccccaatatagtccttttgtggtttcttttaactgagtccaatcttacttgccctccatagagtttgtgattccttagtcacatgtggaattgtagtgccatgtactgttctaatgataaaatacacctcctctttcgaatcgaagttagagtatttacagcttctataaatgagacccttccatcacttaccttcccccttgaaaagatgtaatgcataggttatattaaccattataataaaactcacaagtttatgctagcaagaaaagcttgctgtgggatttagggatcttagttttataatactgttgaacttagcaagagaattgcctgggggtgtgttcaccatctttgcaagacagaagacatacagcaggaagaaagccaggctgtagtaagtaaggttaaagcaaacttctaagcaaataaagtttataaaatgatatctgaaaaacctttgagaattcagcagttaatggagtggtagagaattcagagtcaaaagctgggacccattttcccaccttactaattgtgttcttgagtatatcactgaagttcagttttctttaatttttaaagcacgaccgataatatctacctcataggattgtcctcagatttaaaaagattttagcattttgcaaaacttacaataatattttattagtagtttttagcttacaaaacattaaaggagatttttcaattgataaaaggtctcttatggaacataccaaagcatattatagtcctctactatgtaaattttctcacaaatattacacattggatggttcaaaaatatttttatgcataaaacttgtactgagtgcaatggactcatttacaatttgaagtttttcgggactcagtatgtttaaagtggttgtgttttttgtgtgtgttttaatagattggaataagtctgcataatcctcacaggaggaacgctgttggactgtagcccaaggactttctaaatactcagatgtttcctttctctggtaaattatccatcatgttctatctcatttaggtatggcttattctctgcagttggtaataagaaagtcctgggtcatttaaacaagtaattaaaaggactgttttactatttcttgcctttgaagagtgttaattttatttgttgtgagttaatgatgcatttattgtctatgcttacagcttctagtagttcaaaggtgaatcattctcaaagtaaaaagcgtttttctttggtaatatttaattgggctactgctctttaactaaagacatatgcttttcccataaaaaaaagcctttttataaatgaaatgcaaaactaaacataactctgaagcaagaatgtatcaacttagaaagtctgattatttgcttggaaaaatgccaatatagctaagttgaattattttatgagacatttatttgaattaatgtgacattatttaacagggagagtatcatatacaactgtatataacttgtcaaatgagatatagttttgtactttcttctcagtatacttttgcaggtggctttcacggaaattcattctttcattcctttagtattttagtacctactatgtgccagatactgtactagaagctaggatatatccatagcagagtcagacagacaatcagtgctatttcgataatggtaaatgcttaacaactggctggctgcagggaaagaaaggccctgatttttagcatttgctgattttgatagtgtaaatattcccaccacaactgattttaagctaccaatgtggttgaactgaatgcaaagatatatatatagcatttctaccatactcataaatgtaaataacctaaaaaacataaatttaaatgtagtaaaataattgggaaatgatgagttttgagtatttgttacctttgtcttttatataattgtcactttacagactacacttgctaataatagctgtagtttaatgactagctcgcagaattcctgaaaagttaagaattggcttccacgagccagtataagctgcctccagtacaccactacacaataaacaaagtaaaatgtgatatgttaaatggtgataaatattgccaccaaatacagcataaatcagaagcatcactgtgtgtgcatgcatgcccatgcatgagtactgctttagagagtactgcgggatcagtagaggcctcactgagaagtttgagcaaccttgtgaagattgtaaaggagatagttgtacaacttctgggggaagaacattccaggcagagtgaatagcagatgcaaatgtcctaagcaggagtatcttggcacattccagaatcatcaaggaggccagcatggctggtgcagactaaacaagagtgcagtgtaattggcagtgaggtgattaatagggccttttcatgtaggcctctgtaggccactattaggacttaagttgtcactggggcagttggaaacttttgagcaaatgaatggcatctgactcatatgtctcaagattactctggctgctatgtgattctaggggacaggggccaaggtatggaatcctgttaggacactattggcagtaattcacttggtgattgctggagcattgtggtagtgattgaggtggtgagaagtgaccaattctggatgtattttgatggtagttgattggatctgctgatgtgaagtgtgagagagaaaaagatggctccggggcttgtgtttgagcagctgcaagaatgcagttgtcattaacccagatggggaagattgctgcaggtttggaggtgagaagtatgttttctcagctatgttgaggtgcctattagacatttacgtggatatgatgagtagacagttggatttcagaatttggggagaagtttggtttggagttattaatttgagagtcataagaatagagctgaatgaggttacccagagaatggagaaacgaaaatatccaagagaaattcaacccactgggaagataaggaggagttggcaaaagagattgaaaagtacagcccaggtgttagaagggaaacaaaagcacatagtgtctggaaagcaaacaaagaacatatttcaagaagagtgagatgaaatgtgtctgatgctgcaggttataaggtcagataaggcgagaactgagagtcatccattggatttagactgtgaaggtctctggtgaccgtgctaagcagttttgctgtggctgaccatgtgcagggagtgggatcatgagagtgtgggaggagagaaactggagacagggagcacagagaattctgtccgtggttttgatgcaaagaacagaaattgctggtagctggcaggggaaatgggatcaaagtgttcttttaaaaaaattattttaaagatgtcatggcatgctcatatgctgatagaaattaacccgaataattaaaaggagcaaatttaaggggagcatcattgatgagcaggcatgagaatgtggggagctgatttaccaggcgaagagtcgacattagttagaagcatctttggatcatctgtagaaacccaagggaacagaatacacaggcccagcaggtacaggtgagcaattatgctggctggtagagacttatgaaagatcttataatcgcctttgttttctcagttaaaggagatgatatacatagttctgtaggtccatgtgacagcaaatagactagggaaatgtactgtgatgcctgggagatttctaggcagtactaaaggttcacttgcatttgttgatcttaaaatgagacccataatcttggttgagttttatctagccattttcagctgtatagatgcaggtgtggagtacatggagccttgggtataagcacaggtgggattttgctgggaaagtatgatgaaatgagcaccaggtagctggaggaattgaggatatatgcaagtggagcgattaaaatacactggaatgaagtaatctaaattctagcataagtctatgtaagtagtttaggaggaagtatcttaaaagttttctgttaattttcattgtaaaaataattctagttattatgatgaaataattatatcgtattcattcacagaccttagtaagtaggatagttttttttaagccctgtgatttttttctcattatttcctccacccccgcccttggagagccttcatttttttgtttgctcatttattatttattcaccatcgtttattaagtgcttatgatgtatcagatattatcatctaattgttcacttaacacattctatgaaatttatagttactatgatgagataaataaggagtcaaataatttaagtttacgtactacatggctacttatagtcatgggaacttggacaatccccataatctttcaaggtctgtaaaatgagagagataatatgaagatttctgaagtctaattctgttcataaaaacactgcatcttttaaccatgtgcatgtgtgtctcttcttactagattgtgggttttttaagggcaaaattgtgttttgttgataactatagaaagagagaatatgaagattctgaagtctaattctattcataaaaacactgcatcttttatccatgtgcatgtgtgtctcttcttactagattgtgggttttttaggggcaaaattgtgttttgttcatgactgtatatagagaatatgaagatttctgaagtctaattctattcataaaaacactgcatcttttatccatgtgcatgtgtgtctcttcttactagatggtgggttatttaagggcaaaattgtgttttgttcataattatagagtacatagtcaatgtttattaaataactttagttttaaatatagttttaacaggttgaaatcacatttgttttctatttcatgtattgtttttccagcacacagtagttctaaatggtggtgtccatctcttattctttcttctttttctttaaaaaattttttaaattgacacataataatcatacctgttcagagggtacacagtgatgttttgatacgtataatgtatagtgatcaaatcaggtaattatatccatcatctcaaacttttttttttgtattgaaaacattcaatatcctcctttcagctatttgaaactatataatatatacatattttttaagacagagtctcactctgttgcccaggctggagtgcagtggcatgatcacagctcactgcaacctccacctttcaggctcaagtgatcctcccacctcagcctcccaagtagctgggaccacaggcatgtgccaccatgcctaattttttgtatttttggtagagatggggttttaccgtgttgctcaggctggtctcgaactcctgagctcgagcaagccgcccatcttggcctcccaaagtgctgggattacaggccactaagcctggcctggaaacatgttgttgttaactatagccatcccacagtgctatagaacactagaatttactccttccttttagctgtgatttcttatcctttaacaaatctctccccaattgcccccttccccatacccttcccagcctctagtatcctctgttctactttttgcttctatgagagatcaactttttttttggcttccacatatgagtaatgcagtgtttaactttctgttcccttgtcataagttggtactcatcatgtagtttttttagagtaaatacatcaactttatatgctggtggatttcaagtagaaacagactaagatctttgggattcatatatgcaacaaattttcctaccatattgctagaattcaaaatgtttgaaggtttattctttagaaattttcctccataatacgtaatggcacagatcttaatacggacgctgctgttgtgtttgtatgggtttatatttgtcgctttctagaaaaaaaaggactggctgctcacctccacagatccgtagatgttaccctcaagcctgagagacacccagacttggaacttcacatgtccttgggttctggtaaagaacccaaacaatgtgaagtttcttaaatgtttggtagtaaagataaaaagagaggcattgtatctcacaaacctcataagcaaaacttagaaatccacagttagagttgccttctccaccatctctgctcagtcctgttgctttgtgttttcctctgatcctgcacctgggggtctcatcttctctagttcctctctgtctcagtattaactttttttcttttagagtatcttcaagtgccctttttttgttttgttttgttttttttaatgatgcagagcttagctttatactggctctttttgccatatgtaagcttatctaaaacattttccttcattcagtaggacccaccatccttaaaagacctacttgttttcatcctttgtgactttacccttccctttggggaagaagcttgttctgtttcccgactacccccaaggtagtgctggcaccatctctagatgattatgtattgttaaacaaatataaatatgaaattgtgaatgaagatcacatgggcatgtttggctttgtgtataaaggcattcacaaaatacaagttctcatgatttagatataaaagatatttaagtagttgctctgtgtcatgcatacatctcacattctctgagcctcttcttttgtcagatggagcctacaaatctcgtttgatcttcatatgagtctatgagttaatactttgaacataacttatgattctgttgaaaatcctaaaatataatagaataactgatttccttagctcaccatttcattttcaccttctagtacacaacacattttaactgctatagtaagttagatctgaaatcgtcaaaaatgactgatcccagagagaattcaacagagaaaattatcttaagtggaaaaattctttgaatgatagttgtcatttctctttgccaagttttttttttgcatttttaacctaataatgtaatataatagctaactctcttagtgtttgattataacatggtttcttatcagtgaggctgaaatagaaaaaaaaaagtaaatttaaaaacactaaagtgtcacaaaaatattcacgttcgagagaaagcctttcctcttatactatgctaagatattaagatgtaaattaaggaaatagttttaagtgttatttataaagctgtcacatttaatccattaattctattaaaagagacacatagttgtaaacaatattatcttttaactatgagtttatccactataaaattccttttatcatttcatttgccccataagatatatgtgctataatctatttttaatgttttacagcatatttatagggtgaaattatgcatttaactctatgaatgtgtttggaaaccatctgttagaacttacaggaaaatagaagcttccttcattaatatgttttttcctattttggggacttaaacatttagtattatccttcctagtccatactgagagattaaaaacattattgaagaatgagttctattgtgttcccacagggggattcaaactttactgctttgtagtctggcatactccagaattgttgtgttataaaaataaacatttctgatttactaagggaggaaataaatttgtccagttggtggtagtttagtattttaaacttcgggatatgttggaagaatatactggatagacttaccctccgacataggagtgataaattgattcacctgaaaattcactcaattggagaaggtgaaagaggggtagatttaaaaatgaacacaacagtgtctctgatttcaaggaagctaatagagctgtaaaatatgcataataatttgtagctgagtgatatgatgagtttcaaaaaaggggtacatctaagaccctgttttacctcttgcttccttaggcagttagttgatttatttccatttcttttttgaaaatggagataagattgcctagaacagcacctgctaagctgcagagagagaattcagtttgtgaaaacatgtcttaaactgtaaagtactatgcaaacaaatataaggcagtggtatggcacatattgttggccagatggctatcatggaatagtctgtttcaaaatagaaccaacttttgtcctccccatgagtctgtcctcagaatcctttccatggccttctagctctggcgagtctcttttctgagaactctgggagcagctgcttatttgacacgtacagtaaatgcagctggaacagccaggaaacatattgaattaataacttctatgagtttttataaaacatgcttattcctgagagaacgtccacctgttttaatagtagcagtgtttcttcacttctgtgttgtcaattcaaaccaagttaacgcctgcaagtcccaacttttcctagctctaagtcataatctttaatgcatgcacaatatactgctttgctcagagaggaatttttatgtgcacaactgcagaagaaatttatcctgaagttctctcaaagcgtagccttttcttaatttttaggttttcagaggagtttcacaagtcgtgatttttttttttttttttttaagaaagaatgggatccttgcaaaatgatccggtggactctattagttctgcaacacagtgctgtgccctttgcctcatctgtatacagacctggaaagtgggatcacagcagatgagacccagagtcccctctaaaatactctacgtctcttgggaaaagtggcaccctcagtttctgaaaggctgactgttgctgcttttttcactgtctttaaaagaagactgtgttttattctgaggagaatggagtagaaaaaatttatttcttcctggacccaaaagatacttgatctagaacaaaaattgagaaaacctgaagcaagattcagaatttattagatgaaaaatgaacgatttcctacttttcattatatttgtaccaggattttttgttattccagtaaaaccaaaaagctttacatttgttttctattattttgcaaatgattaagtttttattttatcatttcatttaccacttaagaacttcaagcgatgatgatggatttttttttttaactcgttagttcagctaaaacctgggttcttgtgtcatgaccaggaaaaattaggcatgtggacacattgaaaggtgaggagagcagaatttattaaaagaaatctctcaggaaaaaaaaaaaaaagggtcctgccaacaggctcccacctcacaaactgaataccaggccaccacacaggagctgaagaggccagactcctccccactgcatagtgcaagaattcccagtggctccaccgcattctcccagtgctcaggcaggcccccagtcagctgcaggcacacccagacaaggccctgagcaggttcccttatcttcctcctgcatctatcattcccccctctaaagtagtacatctaactgccattagaataaggataaggaagaggatgaagaccaatcttaactgcttcctgctgacagaaggtgctgttttgggaaaatggcagtcagttctccctgaaaggcctatctaagggtccccagcagaaggggccattgtctgaggctctgattccatgacgctttggagtttaatgtcctgaaggtgagaagagacaaactgagttattagaaaacacatatcaaaatgaaacaagctggggtaaatcccgaggccttttaccagtttgtacagggagagggaagccaaaagcccaactggttaaaaaaaaaaaaaaaaaaaaaaaagcaacaacaacttttacccttttgccagcatgtcaggcttctgggttcccttctcctgaactcaatccttagccaaccagtttaaggtttgagaaattaacttttcccagtttggaggatgcatccgaggggagtgtcccacagtatggcaacacaattatatgtgaagagaggacagaggcggaaaaaggaaactcaggagttcaggatgcattggaaaggggtacagactgaaaatgaatgactactcatctagaaagaggggaacaggcatccctggttcttttctcttccccttgaatacccgggctacatgagagagagaaagtgagacattcctctttcttctgtcctcgcatccctgagtcctggtgaccatgacgggctgctgcccatgggggtcaacgcgcctttaacccatgttaacagggggatctagggagtggaaatatccgctcatacccatgtatgccctgtcttccctggtgtcaggagccttcgagttccctagacctcatttatgccatggatactagcgtgacctttatccatgaaatggaaagcttggcttaattggcaggaatttgtcatgatcacttgcgctgtgccttttaacttccattatcgtctgcctctggatccctcagatccagttttctttccaaggacttcaacgtgaagcttggaatggagtttgggaccaaaaatgcatctcggggggttgtatggactccttatcataagctgaatactaaggtgaagctgtggaattgagtccctccaacaaaggagagaaaaagatgtcttgtgacacgcccagataactggtggctgtagttatgcttggtaagatttgtgtgcatggggcttggctttggttagccctcttggtcttactttcccaaaaaggaaacctctggatgataggcaccctatttattcccatcacctggcaggattttcaggataattgctcagaactagaatgttgatccagatatatacattacccatccctcttgttccttctcagctgcaactggagattgttggttggttcacaggaataagcagggttagtctaaaatgtaggcaaaaacttaaaaacaactaatgagtctagaatttaatgtcaaatgtgaaagttttgaaatgtaatttctctccagtcctcatctttgttaaaaaaaaattatgatagcactgagttgtttgcaaaatagactttagtcttatacttggcctgattatttgcataaagtgcaccaagaataattatttctacttaggccttttagactggctttgatggaactctgtttcacagggaatctcagataggactttctaaagttgagcccagccatgggtttctaccctcaaatacctgtgaattgggtaaacttctctcttcttgaggtctcaagagcatgtggttcctgggcctgctggaaagtaacttttttttttttttttttttttgagacggagtttcgctcttgtagcccaggctggagtgcaatggtgtgatctctgctcactacaacctctgcctcccaggttcaagcagttctcctgactcagtctcccaagtagctaggagagtgtcattctttactcaccacaggttaggaccctatggggactgtgtagacaaggtatgaggccggttttaccaaggggatttttatcagcttttcaagttgagcttgattccttaaagggaagcataccctttcagtcaaagccttagtaaaacaactggtttctccagttgtgtcctattgcaaaagaaaatggattcttatttcacttaagcaaacaactatgttgccataagttaagaatactcacaactagtttctaaattctggagaagccaggcagagagagacaaacatgctccacattttgttcacaggatgtttactcaattattaaaggccattaatagctccaaataagttttcttgactctgaaagacaaaacaaggatcagcaatgttccaagcaaaagtaaaaaagattacttaggttttctgttgttcagtccatttggttaactcttgttttgcttgatattcatgaacattttagctctccatgagtcctgtatattttttctttattccaatgtcacagtctcccaagttatcagaaacatgcatttgagagtgcctgtcaaagttccatagcgtttgtaaaccatcatttgaagatcaaaacaagacaacaattatctgtgaataacaaaatgtctatggtagttacaatcagaaattgacaaagaaatctggttatctctgtggtttacaataacttaacataacaatcttaattgtgattgatagcatatactcagacattagaattttagaaataccatacaattttggaacatatattactattcttgaaaatataacctgaagaagattaaacatcattttgccaatcccatgtacctaaacatgtgaggtaaccctgtttacttttcttcatggtgctccggggtcctccgtagcatccaagagctaagaaagacaactttgaaactgaaattggattttgggaagcctgttaaatatgttacaagtgtaaaacccttgatgttatgaaatagaattccagattaccataagttatttattttgccaaaatgatgactcagaaattttaaaaagcaaaacaccttttataacactttaacaattttgctaaagagcagattagtgccttaagagaaacttgttgtgcttttatttcaatgctcaatttatcgaaaagccatataatacccttttgaatttagtcagtatgttcacacatggaatttcttttgcaagattaacgtttacaatccttccataacttgtttaaactttgagctttatcttaactatttcaaaacaatcctttaactctaggcaaaaatttacattttgatgggatatgcattttacccataatcttaaggttgtttttacttctcaaagattaaagacccatgggccagaaggtaccacagcttttatcttccctttaagaaatatttgatccaagcacttatccttctttaagtcagttaattagagctcttttttttaatagacattacacactcaatacatatataactacacagacaggcagaagatccagtagctataagattttttgtttgccatctcctaattggattattggcctctgggtggagccctttaagagcaagggtaggaaagcatgtagtttctagggcctaataaacaggtatagctgacaaagacagactttgacagggatccatctgcctgtaatttctggggctccatgaggaaaacaggtctctcccaaaatggaaactgtggtaccttttctgttcttccaaagcagtcccaggccatcagaaattatcttagggcctctcattcgtgcattaagagtgacaaggcaaggtcgggcgcggtggctcatgcctgtaatcccaacactttgggaggccaaggtgggtggattacctgaggtcaggagttcgagcccagcctgaccaacatagtgaaaccccatctctactaaaaatacaaaagtagctgggcatggtggcacatgcctgtaatcccggctacttgggaggctgaggcaggagaattgctggaacccaggaggtggaggagattgcgtcattgcactccagcctaggtaatgagcaaaactctgtcaaaaaaaaaaaaaaaaaatgagtagcaaggcaaaatggagaaaaataattcagttgactgagaaaaaacctttctccaaaaaaagaaaatccaaaaagagaaaaacataaaggccttttaaatatacctataacttggatatccacttttaattaagctgagcagtctttaagaaaatccttttaaatccctttctacctgactttagctgtgccaagcagccagtattcctggtttttgaaccttaccaaaggtaacctttcaggtgctcagagagaggaaaattcagggctgtttgtggaggggaagagaatcaacaaatggcaaagatcacatagaatgtcaaacgagaaaggactcattttctaagccaggactgaacctgggccaccatcgcaaaatggtggaggccaaacaaagcattgccatgtggttacaggtcatacttccaaggacgtaaaacaagatggaggcctgcagcaaagtttgccactaaccagtttgctgggccagcttcaacagtgggcctgtagagtcctgggcccgcatcccatcctaaattacccctctttctgacagaaccatacagtaaaacatggaaagcacaccatattggctacagcttaaggccaactcatcaatccctttcgataatcaaaactttagagagaatataaacagtgatagctggggtcctggtctagtaacacggcttctaaaagggaaaaaaggacctttcttttaaaagttaactcctgacccagtggagaaaagaaaaaaacaaacagctgtaagtgcaaggctgtgttaactgctgacagggtggagaaaaaaataaaaaaataaaaatcagccggaactgcaggtttggaaagatgccatggggaagaacctcttattcttatgcatgtaggtttctccaacagggagatgaacttctaattgccgtttcttccctggggcttggatggagctctactccttggcccggggaggggaagactctgtggacttgtattggagaatgctggccagcctgccacacaggcctttgggccatgtgccccagctccagccaggaggtgaggggtccgggagccgctgcttgcccatccatcccacgcatgtctgtggctgttgggtgaggtggtgccattacagtcccgaaaagagaaggacaatgccatagaaaagtccgggttggaccaaggccgacatttctaaccccccagagcgacagggttggggatgcagtttcctctaccctcagaagaagtccaaggacaaaaagcctcagaaaaaaaaggggaaaagattttttgttctgcattttacttacctttcctcatgtccccgtacaggccacgaaaacgatgcaggcttttttgctccttagttcagctaaaatctaggttcttgtgtcacaaccaagaaaaattagacacatggacacattgaaaggtgaggagaccagaatttattaaaagaaagatctcagcaaaaaataaaaataaaaaacggggaggttctgccaataggctcccacctcacgtattgaatactgggccaccatgcatgagctgaagaggccagactcttcccccttgcataaggtgcgaattcctggtggctccaccccattctcccactgcacaggtgggccccctggtctgttgcaggcacacccagacaaggccttgggcaggttcccttatcttcctcctgcatctatcaatggtaaattaaatagaaaagtaggtacaggttgcttattcatcaagtatatgttttaaatatgaaagccttatacaagacatagcatatttgaaatagcatttgtaatttctctgaagcagggtaactagaatttgtgtgctttgttgaactctgatcagcccaagtgctaattaacagtggatgataagagactaataaggagtagtagttctgcagaaagcactcttttgtgattactcagctgtctgttctaagatatccacataaatcatttgatcattttgtcatatttcagttccttaatttgccattattgatttttaatttagctgtgacttcactggtaaagaggaaagtaaattagcaatttgttcttattttatgccacttctttattttggttaaaacccaaaacctatcaattctaaaaatagtgatcaaggcgcaacacatttccatcaccccagttgttcccctcccctgccttcttccggcagccatcactgttcagggttttgttttgcttgggttaatcataggttagtttttcactttctagaatttcatgtaaattgaatcatgtagtatgtttttcttccacataatgtttttgagatgtatttatgtcatctataaagtcattcttattgctgcataatattccattgaatatactacagtttatatgtcttttattgtctataggctgcttctttgaatgctaccacaagtctttctgaaaatgtaataaaatgttttcattttattgggtaaatatctaagaggggaattgttggaccatgaggcagatatgtgtttagtcttagaagaagaaactgctggacatttttctaaagtagtgacaacactttacactccttccaacagtgcctgagagttccttttacttaacattctcaccagcattttgtgttgtccatcttagtagatgtatactacgtgattttttttttttttttgagacggagtttcacttttgtcgcccaggctggagtgcaatggcgcaatctcagctcactgcaacctccgcctcccaggttcaagcaattctcctgcctcagcctcctgagtagctggtattacagacatgcaaaatgaaggtttttcttcagaataagctatgttgtcagatctttttttggaagccaatatttaagatatactgatataataagaaaagaaaactctgcagaaaaatgaagaaaacataatgtaaaaggaaccactacacctgtctacttttgtagttttagtagacacatggtttcaccatgttggtcaggctggtctcgaactcctgacctcaggtgatccacctgtcttggcctcccaaagtgctgggattataggcatgagccaccatgcccagcctgtgtgatttttaaatatataggtgtagtttaaaagaattctatggttgattcaaatgtgatgaattattctaagttatacctatgtattttggtatttttaaataagaaaatgcatagtcttttgaaatgtgcagaaatatttttgttctctggtttgagtggagaaatttgataaatacaatatcaattttgaaaaataactaggcaactatgatccattctcacatttaatatggaaatttatgtttttaatagatgtgttgattagtcaacaaatgacagtggtgtgtcatttcttcattgattcattcacttacatatgtttttttctttgtgattgtctagcagcacagtcctgtagggctttctgtgttcatggaaagatcattctgtgttattcagtacagtagccaccagcaacatggggcacttgagcacttgaaatgtagctagtgcaactgagcaactgattttaaatttcttaaaaaaagtattgctagtgactactttactggatagtgtgtgtcaaaataaatatatttaggtgttatctggtcttttattgtaaaacaaagaaagtgttttccttatttatatactagaaagtgcaagcctggctgtaatcattgcttttaatgtctcttaaatttttgatatttggaattttaaacaaaaatcctgagtattgtgaagttatatttttggtagactaggtctaaggcttagattatttaaaataataaccacccataaaaacatttgttctgctggtcatttgttgctatgcataaaatgaaatgggcagctgattcagttcccctgtctttatggcattggaaagctttctcacatgttccatttgtgttacaggtacatgctttttttttttttaattggtcagatcatttgagcagattgaagttacaaagacagcgaatcattagaaatccagttttcttaaggatgaagtcgtttggtttcaatgattacatgattatgaaaggtgtaatgtctcagtgtgaagaaagaaaacaaaagattctaattagacagtgttctctttcactgtagaatataataggacaaaataaaatattacttgtttctgtttttcccaatctaaaatattttatggttcttaaagaataattgtgactactgctttttttgggtcaattcccagaaatgtggtaccatccttaagtgatgctggagcacagataagtaagttgacagtaaacaaaaaaaaaatgtactttcattcttaaaataatcttttaaaatgatagacattaaataaatacattttgatcattgatttaagaaggatgtgagtccagtgagatattttatggccttcctaagttcactcttggtctgcctagccctgtcttgatgaacattctctcttttttttttttttttttttttggcctcagctcatattaaggacctctctgcattaagcaaacattgacttgaataaaattgtcttctgtgttccatgtttgccatgtttctggatgaaatttgttgactctgtaataaaaaatgcaattattagagctcctattgggctgcagtctatatgtgttccaaattgtgtgggtaaggtaggcaggatcacgtgacctgccactgtgacatcttcatgattcagtgattgcaccctttttgcaagggcctctgttgggagatgtggtgatgtgaagaagaattagtctacatggattaattcccatcctgattgagcttaggttctaatgggaggcagtagacatgtgttagacaaagttacagtaatgccagtggtgagagtatgagaaagcatgagctcaggtatcttggaagcacagagatgggcatgtggagaggctggcagtgaggcatggccttacaggctaggcaggagttttggtgggcagagatggcagaagaagacattctagatggagggaatgacatacataccagcccagagaccagttatatcagaaatatctgtggatttagtctctagagtgtagcatgcacacagagaggtagcactggatgcggggagttggatattgcagagggagcctgattgtgagggttctcaaccagggctggctgtggcttttgaattttattcaggacagtgtttatttacatacttaaaggtaggtctcaattcattatgttttcttcatttttctgcagttttcttttcttattacattagtatatcttaaatattgacttccaaaaaaagatctgacagtgtagcttattctgaagaaaaactttcattttgtagaatgtctaagatcaggcaaaatacaaaatcctccccatcttttttacctttgtagttttcattattttggtagatatatctaaataaatttttaaatgtcatattttattaatatttaaggtgagaatgcttatttcatcatcatctgattaatggtactagaaagtagatttttatttttatttttttagagacagggcctcactctgtctcccaggtgggagtgcaatggcgtgatcatagctcattgtaacttgaactcctaggctcaagcaatcctcctgtctcagcctctttagtagctgggacaacaagcatgtgccaccacaccctgctgactttttattttttttatttttttttgtagagacagggtcttgctgtgttgcccaagctggtcttgaactcctgggctcaagtgatcttcccacctcagccttccaaacttctaggattgtaggtgtgagccactgcacctggcccatgctttttttttttatatcaatgaggacttttagaaggaatttttgagctagaatgaaggtacaggtactacaatatcagagtgaaatttagtttatctgcagttgaggtacttgcattaaattactatagaaaataggaaaaaaaactgttttgtgagggagtaggtaatgattatggttaagaagtttccagataatttaagttctatactgttaaaaatagtaacacataggttgtatatatacagaaaaaaacctataacgtataaatgtaaatataataatgtctaatataaatggaatcacctgaattttattaaaaataaaggatggaactaccatgtagtacttgtcaaaatttatgacatggatttggggattaatattgagcactgaccatgttcctaatactgtgctaagcatttgtctcagctagtcctcaaaacaaccatgagcaagtactgtccccattttgcagatgaggaaactgtggctgtgaggtagtacatatttaattcaagatcacgtattgctaagtggaaaaaatgcaattcgaacctagctccttttgcccatggagatagtgcttgtactcaccagtaatttctcaggatcactgtttgagtgaatgtgcaggtacctaggaggatacccaatagggccaaatcccttgggaaggatatgttgagaagagcagctttgagtacaagacaactttatgattttgcatggaagatgggccctgtccccacagagagaatttccctctgatgcaaagagcaaattataggcacccaacaaaccgtggtcatgtatgcataggtcactggtgggtggtaaatcttgtttctgggaagacttttgtaaccattacctctggaaaatctgaaatgatgataccaaacatgttgcttaccaaactgacctcttccacccttagaagcagtgagaaagttcagtgtcaaggactgagctctgcagcttctcttctgcctctgaaatttattaagtcagtaggccagaccctaaatgatttatgacacagaaagcactcacatggaatacaaatgtctcatagtgaagagcaagaccagttgtgattgtaagaaaataactattaaaatgtgagtattttaggagtatacatattgttgttaaggcatttctagtcagtaatgaattgaaggaggtaacatacccacactaaccaaacttagcatttgtaggccccatctataagatagcagagtcactgcctgggagtttctgaataattactgtctctaaatttttaaaacgttcacagaacaatctgtttaaatgccctttaacgtggttgattctggtgctgagtttagtctgaggactaccaaagcaaaataatttccctgcacatgcccaagtgagaaatttcatcttctgaatgaatggttataaaatgacttagcttcttctgtgtgggtgcttatatctagtttgattttgcctgtggtcagtgttctgatattattatatatacatgtatattattggaaaggagcataaaactttccttatataattccaagttaaaaagagacaaatgcttgccatgcattcagatgttcttacttcaagatttttcaaggtcttctaaccagagttaattgttaactttgtttcgtatcatgcattttttcaaaagctctaagtattgtagtgttctgtgcagctattactcaatatcatctctgtgtcccctttccctgtgctagccttggtgtctagaaggccttgagtatagtttgcttgtttaacagggtatacagaataggtgcattctagaaggttatctatcaaatctatttttctatagactttaacctctcatatcagaatgatgactggttctattgcctagttctggtaatagctctgagtagtccaaagatctttgacaggtatagttgggagatagtcaaggaccttgctgtttgacttttttaaagacctgattaatactctgtattctgattccttactccccgtcagaccataatctgagagaaacctcataacctggccaccaacatggaatggattgttttgtactgtaatgatggtcagatagggactaagaggaactagttttctttcatatgtaagtctttaccttctaactgtataaattgttagcaaaatgttgtataaaatattagaatttttcttttcgatctattttaatatgtgttatatatcataagggttttagcaatattaacatgacatcctacatttttcttcttaccatataattatataaagcaacaaatatttagtggacattaatatatgccaggtagcatttcaattaagaaagcgtaagaggtaaatctagaaccagaatatttcttacagaaaatatcaggatgacagctgattttatgtgtataaagtgatttatctctctgtgctataaattacacccagaggtagtggtagtcaagtataataaagaccaaaagaagaaaaatttggaaacataaaaaaaagacataataggaaagtatttttgaagaaaaaaggcaactccagattaaaaaaaaaagaaatacaatccttgatttacagaatttcaacttattacctcaatggtgcaaaagtaatatacattcagtagaagctgtacttcaagtgcccataaaaccatcatatttttcacttgcagtacaatattcggtaaattacatgagatattcaacatgctgttatgaaataggctttgtgttagatgattttccccacctgtaggctaatgtaagtgttctgagcatatttaaggtagcctaggctaagctataatgttcagtaggtttgatgcattaaatgcactttcagtttacagtgttttcaatttatgatgaatttattaggaaataaccccattgtaagaagggggcatctatacattagtagaaataaaagagagtaaagttgagaatggaaatgcttctgtagtatttgctcaatgggaaactcagcttttaaaacaatgttaagaaagtaatcagacatcaattatagtatagtgaacaagtcaaagagaaaagaatacaagcagaatctcttcactgtatgtaaatactggtgggaactgaatgaaagagaattggatttcattgactaatgttcagtaacatactgacatactgatagtaagaggaaaagatacaaattgtcaaattccaaattaatatcaataaaaacaatacaattaaaaataacatacaaagcagttctctaagatttcattgactaaaacgtaagtacagagacatttttggaaatcagtatatcaagtggctaaatttgtgatgtcattcatatttgttcccttatatagcaaactaaaaatctttgatgtaaagatttaagtggtaaagaccttcttggaatggttagggaaaaaaaaatcctaagtcataatctaattacaggtttgtaattaggaggagggaaatgaaatccaaatggaaagaaaacatgctttttggcctttaaataatgtggatcattcattttaagtaacaagtggaataaagaatagatgtcagtctaaagggctgatgtgttgtgggtaccatcttgcaataagaatactaattcacttatatggttgttaagtagacgagtgcagaagatggaagcaaatttgtatacaaaggtgaatgaaaggaaatagataacagataattaatttgtttgctcattctaacaggtgattataaatctaaaactggaaaatatttttcaaatatagaacagagatgacgaccatcttctctttaaactgatgaacctcatagttttccacatattgcatgttgatgattcaggtgtgagaagtaatatcagaagtgatgatagactagaacccgctagagaggtatttgaaatttagaattggtatttatgagatggttatatttcaggttcatgtatgacagctaagcaattatttgcattcaaaggacattgaccatttcaggtatatatgccttcaaaagcaggaagatatggaataaaatttgagttgttgtgtgtaaattcatttgaaaaattgtaataaagttgttttttcctgggcccagaaagtgaatgtgattaacggttttacctggtacattatattagttatctgtgctgcagaataaattacctcagaacttagtggcttgaaacaacctttactatctcacattttctgtagttcaagaattcaaaaacaaattagttgggtcctttgctttagggtctgtcatggggtgaatttatgcttctctctttgccccctccccaccaaatttgtatgttgtggtcctaactctcagtacctatatttggagataagctctttaaagaggtaattaggttaaaatgaagctgttaggctgaaccctaatctaatatggctgaagtgcttagcagaagaggaaatttggatacagccatgtgcatcctctgtgtatagagcggaccatgtgggggcacagaaagaaagcagccatcctcaagaagacagagagaggccccggaagaaactcagtttgctaacaccttggccttgcatttctagcctccagaaattgttgatttaaccacccagcctgtggtagtttgttatggcaaccctaggaaatttacatggagtctgtcacagtctaagtcactcaaggcttccctgcagaaggatccttttcttcaagcatgctcctgtggttggaggcaggattgatgtctttgcaggctgttgaactgaggcctcatttcctcataagcttttgtttgccactcgagccactccatagggcagctcgcatgtgacatgttccctcgcattatcagagcaagcaagcaagaaggaaaagaaaagggaggaagggagacagagtcaggaagctgtagtcttttataatatgatatccaaagtgacagctggtaacttttgctctgttctattagttagaaatgaatctctcggcccaacccaattctcaaggggaggagattaatttctgtttataaattacccagtctaaggtatgttgttatagtggcccaaacagactaggacaccatctattgtctttatgattgtcagtcattttggtattttaaaaatactataattggattatgtagttaagtacaaatgtaacaacctgtgtatagttttaatgtgtcgctgtaggaggcttaaggtatattaaggcctgtgaatgccaagaggtattgagcataccagacttttaaaaatgttctttgatgaaaaacatcaaatatacagaaagccaagagaagtatataatgcacacttatcactaagatttcagagttgttggctgtcatattcacatcatggtttttttttttttttttggctgtaaatattaaaagtaaagttcagacattgtgacttttttacttctaaatatttcagtagtcatcttgtttaaaaagcatgtcttaccacataacttactatcctagtgatacctaagaaaattaacaattattgcatatccagtttattttaaaattttccttggttgtctcaaaaacgccttttaatagctgacaaagacccactcaaaaaccacatatattctgtttggtctttatgtctcataagtttcttttaatatactggattcccctattgcaccctcatttcttttttctgtgcatcaacttgttaaagaatggggcatacttaaactggtgtacttttctgcctccaaacattcctttagcactaaacttattcccaccagaaacttgcactggaagcctggaagtatattaagcagggggcataacactgataaaatagagacagctgctctgatttgggcatggctgagtgactgtttttccatgcctgccccctccctactcccagccaccttcctggctgaattccagcgtttggcacaacttgaagcatactatttaaaatcatagatggttgagactggaagacggtaggaaaaaaaagggagcagataaagtatataagagagaggtagtaaagcagctgggcaggattcaaatacaacctttcctatgctccagagcaattggctggcgcccagcaaccctgtgctcaatggaggggtgaggacaggttgattgagggacctctcattggcatttatgtcaccagccaaactcttcattgttatttttactagaatgacagctccatgagagtagaggcattatgtgggttttccaccctggtgcctagaacagtgcctggcatttaggcatgcagaattagtactggctgaatgaatttagaaatgaattatgagtgaactaacatttacagagcatctatcagttgtgctttgtgctgctcacataatttataagaaaatagtcatgtattagatccttatgaggtaggtattattgtcacaatcttacaagaaagacacggagctagagagtagtttgaatttacctaaaattattcaaaacaaggtccagtgacctctaaaatgtgtatcacttataccgtggtatcaatgggaccagaaatagccagcagtaatgagagctgggttttaattttctatgtgctgtttgcagactgtttttttatggaaatgattttatggaaatcattttggttttctgttcttcagtctctttatgaagaatatagttagttaaatgttttcatgaatcattttgagggtaagtttgatataagtgtttttaaaaagtatttcagtaggtattatctactatctactttagcatgtagttggcacctttattttgtctgacgttaagaacttctgaatgatgcagtcgagacagtttgctcatgctatattttttagagttatgtaaccaaaaactattatatacttgtccaggagttactatatataaaaaatatttacaatacacactcaaggcattgtgtgacatatttcctactagaacttgattgaatgtaatagtgaaccaaaatgaaaataatatggtacctgattgttttatcaaatagttttcttttaatggtatttgccttaatagaatttgaattttttaagtatagtaatttataggaaaactttgacagtttaagttggcaattccaaatcagcccactcattgtattcactaaagtgttcttccaaaaataaatgagtaggctggcattgtgttttaaacatcgagctaattttggttaattatataaatctaaaagccatgggcaaggcagcaattcagtcttactagatgatgatcagtgaaattgtaagacagcttgctgaatgatgcacatcaagctaataacctgaatgcattgtgtccaaaaggacagtgtctggcagagcatcagataggaagccttcccagagctttaataaggggcttgtgaatgcttgcaaaagagggtacaaagttagaaacagtagtaatggctctgatcagaattcaaaaacattagagaaaaaaatagttaacagtagagaaaaaaagtggtttccatgcatagctaataattctgttacatggtagaaagctggggttgagcagcctcatgggccatcccttacttgctgcttatctctagtttttgtttaaataaaattagagtgctacattatgtggggctttcatttaaattagttgaaattagtattctgccactagcaaacaggaaatacagatgcagaataagaatgtggtgccgctggagagtttagaggacttgactctctaacgacattcccattcagaaaagaattgtgactccctttgtacatgattgtaaagtaatggcacaaattatgttatgagaatttttttgctgttattgtgttcagttggtatagttatgttgatgtatataaaattagagtttgaatttattgaaatctgtgtacaatcatagaagcatttttttaaccctgtatctcatcccttgccttaaaaaaggctgtgactatttagaaaacatctttgtacctgaaagttgtatgatttctttatcctggttaaactgatctgtgattgtctcttggatttattcaggaaagaggtgcatctctccttcatccagattccaccggatgagccaagaatgactgttgaggctattttacttaatgaattaacagatttgactgaattttctttttgcagtgaccatatggttattgtgaagatccatgtaattatttgtagaagtgaatcacagggaattttgattgctgtagactctaaacaactgatccatttaatcagatttttttttcaattctgtacagcctgatttttactagcctatacagtcagaagcaattaaataaagtcctacaaaagacagcagagactggcttaaagctaagttgaataacacagctgggtttttacagtgtttcctttggtctgttactcttatcagtgggcttggtttagcatatccccagaaaattatattcctgtaactgccagagaagtttatataacaaaatgatttgtgccacacacccaggcttgtcctgcaatatcactttagataaagcaaacatttttcaactatttctatttaatacattgcttccagactgttctagtcatatgttaattacaaaacaaatgatgtataaaatttcatttgtttttaattgtctttttaaacacatattgcaaaatcattctttgaataaaactaacatgttaatattttccctctagaatgaattctgtgaaagataaatgtattttataatgtatcacatatgtgaaatagaacattgataggaattatgcaagaaagcatcgcactttttaaggtaacagtacatttgactgtcactgaagttactttatcacatctccacatgtacaagacagggaagcagttgcattgtgtgccaatggaggaagttttttttgtttgtttgtttttgttttttttgagacagagtctcactctgtcaccaggctggaggtcagtggcacaattttggctcactgcaacctctgcctcctgggttcaagcgattctcctgccttagcctcctgagtagctgggactacaggcgcacgtcaccacgcccaaataatttttgtgtttttagtagagatggggtttcaccatgttggccaggatgatctcaatctcttgacctcgtgatctgcccgcctcagcctcccaaagtgctgggattacaggcaagagccaccacgtccggcctggaggaagtttttaaatttcaaaaggagaagtatattttctggacttttctataaaccagtttgttgcttctcttgttgatgccagtagaatttatacaactccagcaacatcgtttgggaaagagccagtttttcctgtctttcacaatagaagttactgattagaagaccctaaatattttttagcattttcatgtccatgataaaggctgcaacaaggggtaaataactttcctcttatggcagaaaatattcttatgagacccccagtgcactttttcagtatggtgtaatcacatgacagttgtagggtaggaccctcagaactgcagctcacatcaagagctgtgggctccgaaagtgaaccatatgttgctgtagtccagagagataccaagagaattggcttctgagtccagcaaacctagattcaagtctgtccctgccagtacctgctctgtaactagaggggagttatagttagcttttactagcctgagttttttgtatatgaaatgagaacaatgaccaatagtgagaagacttttttgtaggactgagtaaaataatacatgcaaagaccccagcccctcagtgctctcaggtcaacacatattaatttccttcgtctctctttgaaggtcagaaaatttggacagtggcgtagaattacagtgctgtgggccagtgtgccatctgatggcagaaagcactaattggatctctctgcatgtcagtgtaacataaagcttggctcacaagatacaaagtcatagatcctttctcaccctcctttgctggtaagaaggctctaactgagattcttgacagcaaaatggatgattaggagtttttatagtaacttgaatgtatttattcttttacctgatgtgttttaaaaaaagaaacctatcatttgtataggtaaaagtaaaattgctagtgttactgaacacagcgtgagtacctagtcttgacactgtcatgagctatcgacactcagacatgttcttttatcctttgattcacaccttcatcagcaaatgtgtgttgagtattaatatatgataccccttttgctggagactcaaaaattagaagaccaaccctctatttataggcttataagcctatcaactccttcagagtagagggttggccttctaatttttgaatccccagcaagaggggggagcattccatacataagagttatgttccatacataaggctctactctaaagagttatgttccatacataaggctctacataacccagaggaatacatgttggtagaggcagatccaggccagacctcctgcgtgctccattaggcccccacccctttgctgttgcagtgtctctttcttctttatagacttatctctcccgtgggacaaggtatgtggtagaaggtcaagaaaatctttcctgaagtgaatcgaattagtatatgatactttgaaagtggtcattacgagggtggggagagcctggtaatcactcgcagtctcagttgtctcctgtgtgttatgaaagagttcatgtccttttgaatctgtggcaaccactggtaaacatcaaataataatttgccagaaactggtgaaatcaaatataaatcaatgtacaatgtactacattctttgttgcctaagcagcatttatgaattaaccaagtaatgagttatgttattttttattatataggttgcataatttttagcacttttcttaccatattctaaaaaccaatagagggattgtaagggccttttgccaactgaactatgaaaagggtagataaggcactgaatatatgactataaatgaagttcaactgaaaacaacctcaggttcagatgattgttgtttaacattttttcaatttcttgagcctttcagggtttttaaagcacttgcaagcctggtgatcaccatgggaaaaacactgagagttattggggtcaccattgctcttgtgattcctttatcaataggttctttatgaaaataaacttggcatgaagggaacactgtaaattctgagggttgtaactgggtatcatttatttaaaagtttagtgatcctttgaaaaacctcaccaattttgtaatgttgtaatttttaagactaaccaatggtgcttatgtttttcctgatccattcagttctctgtaatggctaaaattggcttacctgaccccactcttaggcaaggttgttttcatttttacttacttttatgaaagctatcttattcctttgattgctgctgcttatctttaaaatgacccaattagtctgattgtttacttcttcaaagtgctatatgtttgcacttataacacacagattattttaaataacgtttccttgtggttttgctgtatgtgatttttccccctcagctctgtttccttcccgttccttctaacctcatctctgatttcattgtgttttgtattcctcatattccctaccagtcctttagcttgtattcttcccgccatagcctttgcctcttttttgcagtccagtaaggcccactctgcctattgatgccatgttttgcttatgtccctctcttatatcccttccttggtgttctgcctttttacctattctcatgttttcttcactcttattttccttctctcatcaacactcttggaattctttagtctgctcttgccaaatgagttttaggcaatatcaggatatttttgtcccctgggactgcaccccctccaactcccccactcccacacaccctgtgtttaactgggactttcttccttgttttcttgctctttctcgttggagactttgtcactatcctctctgcattctgctaacacaacttgttcaatgaatgtttgttgcaggaatagactgacttttctaattttatccctacttttatgcacatactcttatgctgtaagatatattaggctggcctgtaggatttatcttgaacaaatttccatttaattttcctattacataaaatggttttattgctaattgttttctgagcctaccatgtaggaaataaataatctataagagatactcagaaaaattatggccgggcacagtggctcacacctgtaatcccagcactttgggaggccaaggcaggcggatcacttgaggccacgagtttgataccagcctggtcaacatggtgaaaccctgtctgtactaaaaatacaaaaattagcctggcatggtggtgcacgcctgtagtcccagctactgtggaggctgaggcaggagaattgcttaagccctggaagcagaggttgtagtgatccgagatcacaccattgcactctagcctggacaacagcgagactctgtctcaaaaataaataaatatatgaataagtaagagatactcataaaaattaatgaaaacttttagatgttaaaatcttaccaatgcttcaaggcccacttcaagtatcactgcctctgcaatgaattaatctcttaccagactgtttccatgactccatttctatgtattttgtagcactcatgaatattatacatggttatctttacatatgtttgtacttcttattagttcctccaaaggacaggagcatctttccgtctcctatagcatttagcatgatgccctgcacagcaaggatacttgttgacataacataacacagatgtttgctagactgaatcgagaggtataatgagtatagaaaatgaaaattcagagaatgtggttattgagctagatctcctcatgaggcaaaaagaagcagtgaagctcaggccaaagattggaccttaaataagaaagcacaaagtacagggtatatcttaggaaacactgatttttgaagctttaagatatataatgagtatttcaatgttttgcagtcaaatttgctaaatttgtgaaggaagaaatgtaaatatatttggtagtgattgaaattatggaaatatacattatttgcccattttgtttttcattgaaaggacgtaagtcactgtgttagttcctagaaccatagcgctcaactatgtttgaataatttgaaacttttatttcagttacatgtaagtaactacagtttaaacggttttccctgcatttacgtataactgcagatactggtttcgtggaggaaaataaaatatgctttctcttatctttcacccgctttttccccaagtctgctgctcttagtaccacagtctgctcctctcctttggaggttataactagaacagggataaagaaaaagcagagaggggtccttgtgaacttagagaactggggaaaaagaatgaagtctcaggagatgaagggagggacagacactaagtggaattctcaagaaaatgtctctagcaggtgccacagctctagcccaaggagcggagactgggactcagtttctctttttgctccttgctttctcagctaagctctaactgttctctcaaacatggtttaataaagattcgtctaaaagaggaattagtacacacattaatctgtgactgttagctttatatagagtttaccagaggaaacagctcatgcacaggtgtatacgcattctaaaacggaattaggctaggtgcagtggtgcacacttgtaatccccacatgtgggaggctgaggcaggaggattgtgcttgagctcaggaattcaagaccagcctggacaacatagtgagaccctatctctacaaaacataaaaataaaaaaattagttaggtgtgatggttcacatctgtagtcccagctacttgggaggctgagatgggaggattacttaagcttaggatgttgaggctgctgtgagccctgattataccactgcactccagcctgggcaataatgtaagatcttgtctcaaaagtaagagaattaattttattattaatacatacttgatatgctaaggcaatgtgaaaactcccattcttgttatttctgtgtacactgttttctttttctttactgtaattgacattcttttcggtattgcttgtaactttcttcccatgttaacccatctaggtgaataagtaactgtatttataaattgaaaaattgcagaacaagtcatttttatttctccagggaaataggatcacattaagtctgatagtagttagccaaaagtgcacttcagaaaaattatgaaaatatagcatgctttaagatttcttttaacagttgttgaaaactagatttattctcccataggagctcagtgaaattttgttaaaggctaggtttatttactgttattaagtttacattttcctgatgcaaacagattattttagggtaaaaataagatatttttgtcagttttaagccaactgaaattactactttaaggctgggcacgatggttcatgcctgtaatcccagtactttgggaggccgaggcaggtgcatcacctgaggtcaggagttcaagaccagcctggccaacatggtgaaaccccgtctctactaaaaatacaaaattagccaggtgtggtggcaggcgcctgtaatcccagctactcgggaggctgaggcaggaaaatcacttgaacccggggggcagaggttgcagtgagccaagatcacgccattgcactccagcctgggcaaaaagtgaaactctgtctcaaaaaaataaataaaataaaataactactttaaacagtgtagtacagaatgtatgcaatgcttgatttgattaaagttaaattcttacttcatcctacctcaaggataataagtgcattttatgtttatattcaaatttgttaacatatgcattgcttttatgtaaagactttgaatctttctggttgatactgtgaaatggaagacctagggcttggctttgctcatattttaattttgaattgttagtcatgaatttttagtgtcttgtttcctctttccataagcctggcataaaatgcatattctcgatagttatcgctcatccaataatgtgaagaaaaggaattaaagcttgccttcatttagtgttctgtcctccaccaagtttcggtctaatttaatcactcattattttgtcttcagataacagcttctgcaatttttcctccacatgttagggtgaaatttacctatttcacaagccaagaaatcaatcttgatttttttcaccctttgacagtacttgtgttcaaaattcaagactagtttcaaagccagaactttatttatttatttattgagacggagtcttgaactgtcacctgggctggagtgcaatggtgaaatctcggctcactgcaacctccgcctcctgagttcaagcaattctcctgccttagcctcccgagtagctggtattacaggcgcctgccaccacgcccagctaattttttgcatttttagtagggacggggtttcactatgtggccaggctggtctcgaactcctgacctcaggtgatctacccgtctcagcctcccaaagtgctgggattacaggtatgagccaccatgcccagccacttttttttttttaagggtggttattggtgagtagtttgcattttagtaaatacatactttgtctctttacctagtagtgtgaaatatagtagtctgcatatgttaacgaatgtgggtatatgtgtgttttaaaattaagaatctagtacgtttgtcaccaaagtttcttaaggaggaatttcttgacaaagccataaaaactgagctttcttgaagggtaagggatttggagtgtggtaggggagaagaaccaggcattatccaaaacttaaaaatgggtgtgggtgtgggtgtgtgtgtgcgcgcgcacgcacgtgtatttatttatgtttatggtcatgcattcctatttagtcttcttgagttaccatttgtaatcagactagggtcctgggaaagttttttgcacatcatttagtacatatgaatgtgagctgtgtttactttacaaataggttatatttcaaaacgtgattctgggctgggcgtagtggctcacacctgtaatcctagcatgttgggagtccaaggctggcagatcgcttgaggctaggtgttcgagaccagtctgggtaaaatggcaaaaccccatctctactaaaaatataaaaattagccaggcatgcacctgtggttccagatacttgggaggctgaagcatgaaaatctcttgaacctgggaggtggaggtggaggtggcagtgatccgagatcacaccactgcactccagcctgggtaacagagcgagaacctgtctcaaacaaacaaacaaacaaacaaacaaaaaacagacttgactctgtaagttctttgagatgtattcttaaaaatatttcctttatgaaataatgttattaatagcatagaattccatcttgggatgctaggaatgtattctccttttggagaatacatgttgtttccctggaggataattcatttcgtgactcacattttgggccttcttttcctgaggccctataggtgaagagctgtctcctgcatttctgggtcttggcctgtgcatttggctttgggtgctgatgactagtatggcccttgatacaaagctagcagggtgtctggcatgaatgctggtgtggggtggggtcatgggagcaaccttcctgaggtacagattattttaaatttggtcaccatttgtgtacaacttttattccctgttacttgcttgaactttagattgcaaataaaagaacacatcactttttatttaatactattttttgtttattttaaaaatttgttttaatagagatgtggtcttactgtgttgcccaggctgatcatgaacttgtttatttttagagatggggtcttgctgtgttgctcgggtaggacttgaactcctgggctcaagcaatcctcatgcctcagcctccccagtagctgggctacaggcatgcagcactgtgcttgggcttacatatgtttttgatgtagatcaatttgctagagatttgaatagtttaacttcatattgcctatgaggatgatctgtagccatgaggattcgaaggtgcattattttctatacagcaatgattcatgttgttttaatagtttatgaatatcctcttcaggtattcgttatcttaatattgcaaagtaacagacttgaacttttttagagatgaaatttaagcttttatttatgagactattctgatttgtagaattttatgccaacatttaccaaaagaaaaagatgatctcgatcttcagtttgctgctatatatccagttcccgtaaaatattttatttttaaagactagtacagaagatattgaaaaatattttgatttcttttgtttctaaagatcaagtgaaataaatgtgattaaatgttactaagttactgaacatacagtaaattgtgttcagagtttgcttgaaataataaacaaatgtaatcaggcattttaactggagtaaaagacagctgtcaatattcttgaaactttataaaagacatttatccctaggttatggtattcatgttataaattagccatgaaggatttcatagtataaaagaaaaataataaaaccattgtctccccttatactttggaagtgctaccgcacttttctcttgaacaaacaataggagactgtagtacacatttgaatgattgacgtttgtttctcgggaacagcctattactgattgtgggaaaaggaggttgcccatacttacctattttcattcagttccacttgctaaatgagcaccattatgtaactgttgttatcagacaatagccctttttctagattttgggtaaagtttgctgggactgtacctatcattagaaagaggaaatctctttctaaggtactgtaataccagtattagtttaattttatactaagtcttttaacttcctgtaactcttttgagtagtaaggataaactctcctacctttggtctttcattagtgtattctgagtctacatcaagatctgtaaaatgcaaatgataagatgcacatcagagttgtaggtatataaataacattgaaaaaaccatacaggcaaatatatccaaatgaatcagaacctgtaattcctaatttatatgcagaattctagtatttaataggaaatcaacaaaatagcacctcactcttctggtgtcccccactgcacgtgccttccttctcctattccaggaaattttcagggtcaaacatattaagactctcataaaaggttcacaataaggactccaagattctgagtcaggtgaaaatcttacattgggctcactgtgctctgtacattttggaatgattttaacacattgtaagagtaagggggcttatgaataatatttaaatagtactatggaattttgtaacccagatcatcccatctttattatgatggcattttatgttaatacataatgtgtcatacattatgtttgttttaaaaaaaaccctaagttgaaatacttttccctatttcaggaattgaattcgaaatttcttcaaaatcgcttgatgtcccctgactcttgggaactccagtttttttccctgatggttgtatagcatatgataatattagttattttcattatggttcatattttctattatttataagataagattggcatctgggcactgtggctcacgcctgtaatcccagcaccttgagaggccaaggcgggtggatcaactgaggtcaggagttcgagaccagactgaccaacatggtgaaaccccgtctgtattaaaaatacacaattaaccatgcttggtagtacatgcctgtaatcccagctacttgtggggctgaggcaggagaatcacttgaaactgggaggtggagattgcagtaagccgtgatcacgtcattgcactccagcctgggcaacaagagtgaaactctgtctcaaaaaaaaaaaaagataagataagattggcttatctactttatagtaaattgaattcctcataatgtcttctttgcttttatgatttatattttggaaataaaagtaagcccttttagacttaattttagacctcaacagattttcttaccctacaaatgtacagtagaaagttttcttccaccctaacaaatctatttcctacatttaattccttacacttattagaaaaagtcatcaactgacctgtgtactttaaagtaaccctttgcaactgtgtcataagcaaatttctaatgatctttccatttagtgtggctataattgtttaagttaaaaatagttttctctgcttagaagataaacagtgaagttagatgtgtactttagaattatatgccctttatctctgtattagtccgttttcacactgttataaagaactacctgaggccaggtgcggtggctcatgcctgtaatcccagcactttgggaggcggaggcaagtggatcacctgaggtcaggagttcgagaccagcctagctaacatggtaaaaccccatctctactaaaaatacaaaaattagctgggcgtggtggtgggaacctgtaatcccaccttctcaggaagctgaggtgggagaatcacgtgaacccaggaggtggagattgcagtgagccgaaatcacgccattgcactccagcctggagtgaaactccatctcaaaaaaaaaaaaaaaaagaaaaaactacctgagactggataattgactgagtccattaagcagacttaatctactcacagttctgcatgactggagaggcctcaggaaacttacaatcatggcagaaggcaaaggggaagcaaggcacgtcttacatggcagcaggagagagagagagcaagagcgaggggggagctgcccaacacttttaaaccatcagctctcatgagaactcaccatcagaacagcatagggtacaccacccccatgatccatacacctcccaccgggtcccaccctcaacctatgaggattacaattagagatgagatttgggtggggcacagagccaaaccatatcactctcaaatttatctgtgccattatttttcttgaaaatacatgccattgtgaggtaaatttgctgactaaacctatatacacctgtctttctaagacttcaataaattatttgccatttttctttttgaacaccatttgttcttaacgggagatcccgtaaaacacttactatgtttggaaagtttttgctgcttctggctacttgttatttttacaaagatattatttctctccctttcttttctcacctgtattaccttttttttttttttctcatgagctgccttttattacctgtcaagcccactgctttctcttttgctgagtgtacgtggccagggctgggttccagtgctcctagtgtgaagctggcttctacagacctcaaagtttatctgcccttgacattgttatccacatctttcccccaactccaccccagctgcaccagctgccttatctcttgctccacagcgtgacccccctgtgcacactgcaggatcaccgtgattctgttgcctggtttctgatagcccttccaacttggagctttgccttagtcatgctctgtgcccactggctctagctagttcctagccttgacctggtgtgtaccttctctgcttctggttgtctttctgcttcctgactaccttgctgtctcagccctgtgttccttctcgtgtctgtgttggctcttctaagttccctcctgtccttgtgatacactgtgctgggaagacagccagcacccctggggctgactcccttgttttttgtagctctttgaaaattatatttcagtttgggtaagttttactaaattaagaaaaaaaacccaacatgccatctgatcccttaacattattttactatatataaaaaaatttagcgaccataatctttaaagcttggtaattgttgcttaggtatatacatgtgtgtatacatgtgtgttttgtcacttatgtttcaaaatattaatctctttctcacaaagagtaaatattctgtatacattgtttcaagcacaagaaagggaatattgccatagatttcaaaatcttcatcataaacaggcattggtggtacagttttaatagacgaagatataatgtccttgatataatgtccttgaaatctagtcgaaacatttagcaatcctaatttcatgttccagtggcattgaaatcaaacataggagatttcatccatctgactttaggtatttccatttaataaaatggagggagaaaggccaggctcactcatatctttgtggtgggtggtcaggtggtattgatgactatccttctttttctcatctggccccggtacatggcacgaagacatttgaagcaagactgatcaaaggtacttcactatttcttgccttcttgcagttaaaacgaaagaaacagcctacttcaacttctttatctttttctatcactatttataggtatactgaagtctttttcttttttttgcaaatgccagtggaactacttacttctgacccctaaacaatatcatgtttgctttgatatgtatcccatttgccttgttttcaaaacctttttcatcttttctcagacctgcgccaaagacaaaagcctaacttttattttaaaaacttctgaaaaaaacatccgtaattgcttttaagagtgttaggcaaaagatgaaagttattttggtatacttaacagttatcgtttttaagtacaaatttttgtaaccttggaaaatacttaaattgagcagtaaagccagtagtaaaaatatggatgtctttttatttgaaggactatcacatgtcactgaaggcaagaaaagactagaatatagacttaaataaattccaagggtcctttcacacacttatacacacacaccacaggcttaaataataaaggtatctaattcaatcctcactcagtactcctgagagcactttcttgaatctacatgatttttatctcatttgtaagaaacagatgttacattgagttaactgaatttggaactttcattttgatttttcttgctttcaagaaaagctattttaaacaggcttgatacatttttgtaagagtgaggaggtaatgcggaattgtcatagaagttaatgtatatattaatattcctttactttccaggagggatttgtctgcaaaccgccaccaccccttgctattccctcatactagaatatgagttctaattatcaggatttttgtgtgtttggttagttgatacatatcaagagacctagaacagtgcctggtatacattagttgcttagtagttgtgttgaataaataaatagagggagaagataactgtttcaatacctgcttattgctcataatatataatctacaggtttaggtggatatttggaagtaactatccttattctttaataccaggacagcaacagaaatcaggtgaagagggaggtactagttagctaatgaatgagctagaaagaagccaggccctgattagttctttcttcttccactccaaccactggcaaatatctaaatagtccttttaatttaaattaaatgtttaaataattttaatatctgttctaataagggccaagtatacccacggctctaatagtgatagtttttttctcaaagccaaaatatatatgagaggaggatgcgggcaggtggaaaggggacagagatggaaagaggtagagtatttggtagtttttgctttttttaaaaaaattttccttaaaaatagagtagcgtgcaagacatctagaaaagatggtggctaaggaaataaatattatatttttatgtactttcgtgtggccacatggagcagcactagttcagtgtgtgccgaaaatcttagtggccaaaaaaacagcctttctgaaaccttaggcttcaagtatttgtggagggaggaagtcaaagaaacaaccccaaacttcaaaccctgagaaaaacaaagacccaaagaaagtactcaggattccttcattgttctggtcatgccaagtcaggaaatgagcattcagtttggtttattaaaatcatttttaaaggagcattttcccttgaaaagtggaaacagtgaaatggatcagaaaaaaaagcaaagcatatgaaaataataacaacaataagaattttaaaaataacagctcaaattcgtggagaatgtgatcatggaagagaactctactgtctgggagtggaagaagcagtttccaacttcacctccatactttaatgtttgcgcttgaagacctatgaccaccatacttagtagagcactattgcccacataatagtaaagaataatttttatctaattggaaatgctatcctatagcagaatctggttttatcattaaagccagaggtcagaaatgtgttaaaatgaaccataaggaattcctgattttgcaatcaggatttgaaaacaggtaggaaacaactatttcctgtggcagctcagttaaaagtgagcataggaaaccgtttttggaatagtacagcaatgattcatcagtcctgaagtatattggggctagactagaaaaggtggctctgaatttctttgcagagtcagtcatccaaatctactgactagtgccctattgttgctcttatttaaagcctctactgttttctgctgggggaattcttaatgaaaaaataccaaaagacttcactgatgatttatttgaacacattctttgatgtcatcttaacataccattttaaatattttgaggagtggtaattccactcaaagtcagatagtaggtttgaaataaatatggcatggtgtcatgtcagcaaaagcactataacattgccattaattgtcattaatgactgtgaagtatttatagatttttagaatgagcttctgtaaatgtgttctcatgtaaatttctgaaataataaaagatatccttttatcctttgtgaaaaacttagtgtaagagaagtagaagagagggtgcaagtggaccgatggaacagtgtctgtgttcttgtgtctcagtcacacacagcatcagtaagaggtggattgagagggcagtaccaagggcaaggaaaatgattatttctacaatgtgaggaaaaacactaggggaaaaagatgtttgaagctttgatttgttaattacatttatagaaagaagccatattttgttgctgataaaggtcagcatgatgaagcatgttttacatcaactttttgaaaatgtggtaagcaaaaaaaaaaaaaatgctgaaatcagtaacctctaaataacttgtgttcaagattcacattaggtccggtacccatcagtcctcagcgtctcatgccatctgtatcagcatctaagtctgtatcttaatgtaaggataatattaaagggggaaaagttacattatgtcacatacacatgtgtacatatataatctttttcaaaagcaaagccactgtatttatgaataaaaacattcaagtaagcatttagtagtcattttcttaaaatatatgttgtaaagtactgatctacagatgaggcagtaagttcatgattccttccctgaggattccgaataacttataataaatataagtatgctcacacatgccacagattgcagaggcaaataaattgtgctcacaggtgttttttttgttttgttttgttttgtttttttgggggggttttttgttgtttgttttttgtacatagatatagtcattgtatcagcaaccgctgattggcatatgcatgctcggtaaatatttctagagatgatttgatgttagatctttttagagattctgtatatgctcaagtgcatactatcggatatggttttatgacaaagacaacttccctgagtatggaaaatccttaatagaaaagatgtggagtgatttttttttactttaatatagtttacatatgcatcttatacatgtgcatatatgcttaaaaactaccgtcgataaggtcaacagtatcaacaatgaccacatccccatggtgagccttcagtcttgtcctcttgttggcagttgacactacacacagtccaccatggatgctttttcctccctttgattcccagattctgccttatcttgctcccccacttggacttttcttcctcaggtttgttagcaagctcttctttccctgcctaactggaaatgttggtttttttgtagatttctatctaggatcttctctacccttcacttcagcttttgggtaggctcagtcagtcattgttccacaaacagaacatggagtccttactctctgaggacaacctatcttttaagttacattccagcctttctcttgtcgaacatgtttttcaagcttgccctgtccaatggtccctggagttttcagttcactaggcctttattcattcattgtctctattgtgcatattaaaagttgtaatcagtcacttaattgtatcctttaacgtcgtagatttttaaagctatttcttcattttccatgccacgttgttggttgcttaccagacatttcaactctttgtcctagaatcattaacacttaatctcacattagagaccctccatgatttgggccattttctgtgattgtctctaaggtacagctccttgagttttggatctcagtgtgttttgccatcatctgcacttggcataattttttcttgacccagctccaattttatcttgcaccagtaccccaaacaaaaaagtaaattgtggaagactaattgtcatcactgtgctttaaattattttccaaggtatttttaattattttccaaggtatttatctcctcgaactttctcagtttagcagtaactttattcaaacagctcaggttgtaaggtgtacatcaattctttaattcttatctgtagtgcattgtgaatcatggcttgagaggatgaaccttatttagttaggaagtatcttccaaacataaatgattcatttgtcagcaaagataatatcataaaagaaaatataacataaaacagctctcaaatattcccgctaaataatgagaatattagaaggagctacttcaggttaaatattgtgactcaaggccaggcacagtggctcatgcctgtaatcctagcactttgggaggccaaggcaggtggatcacaaggtcaggagttcaagaccagcctggccaagatggtgaaacctcatctctactaaaaatatgaagaaattagccaggcttggtggtgggtgcctgtaatcccagctactcaggagactgaggaagacaatcgcttgaactcaggaggtggaggttacagtgagctgagatcacgccactgaactccagcctgggcgacagagcaagactccgtctcaaaaaaaaaaaaaaaaaacactgtgactcaaaatataagcctttcaaaacaaaaggaaatgcagcaaagagctttttaaagtatgttttaagtgtattgaaaataagaatttcagtaaaacagttgttaaaggttgatttatgtttgttaaatgtattttttaaaatattggtggtttccaaatccttctgtttcttagatttagtgttctgtatataaaagagtatatatttgaatctcaataattatttatcttaatgatataatgtggctgttcccaacctatacactgcagacaccaggggagccagaattcttagaagaaatgttgaaatccatatgcacacaaagttctgtttactgtatacagtaaacaatatggctattgtggtattattttaaattatttttttaaaaaccctttcttctgcttaccattgttttacaaattaaaagccatacagaagaatataatacagaatggtagaattacctataggtccactattatggcagccaccattaagaactacagatctagctgggtgtggtggcttgtgcctgtagtcccagctcctcgggaagctgaggtggaggatcccaggaaaccaggagttctaattcagcctgggcaacagagcaagaccttgtctctttaaaaaaaaaaaaaattaaaaaaaaagaattatagatggaatggtaaatactaattaatcatagccagaatttaaataacactatttgtcagacactgttccaagtgttcttgaatatactgagtcgtgtaatctacaacaatgcaatatggtaggacctttgctatcactacctaacagataaggaaagtgtggcacacagttaataaacctgacatatatggctcctagtttttcctttgggtagactataattctgttatctacaaaaataggaacatgtcatcctctatatactgttctgcaactatcaggtccaaaagaaattccccgtaactctccaaactgctcttccccccatcttagatatcagttaatagtgtcgccatccagtatttctgcaagtcctgttgatactgtctactttaaaaaaatttctctgaattagccacttctcactgtctttaccacttttaccctacttcacaccattattatctcctgcctggacaactgcagaagcttctttggctggtgtgcccatgtccaaggtcaccgacttctgcagtccattctccacccaacagtcacagtaagattttaaaatgttaataagatcatgtgacctgactccttaaaacattccagagttcacagcactctgatggcatgcaggacaatagtctgcctccttagccttccaaagccatgggatccagccccaccatcttcttggacctcacatcctgcaccctctcatctttccttcctccttattgactacatttttgccccattgccctcatttttctctctggaatgtgttgcattcattcctgtctcagagactttgcacttgcccttacctttggcaccttcacgtggctggctactctgtcatttcagtatcaccagagaaagaggccttctgggccgggtgcagtggctcacgcctgtaatcccaacacgttgggaggccgaggcgggcagattacaaggtcaagatatcgagactgtcctggccaacatggtgaaaccccatctctactaaaaatacaaaaattagctgggcgtggtggcgcacacctgtagtcccagctactctagaggctgaggcaggagaatcgcttgaacccgggaggcggaggttgcagtgagccaagatcacaccactgcactccagcctgcaacagagcgagactcttgtctcaaaaaaaaaaaaaaaagcggccttctggagctattttatttaatggatcctgtctcccccaccctccccgtccaatctcagtgtctgtcattttctttgtaatacttccctctatctgaaattatttgtttacttctgtattgtctctctattcgccatgactatagaagttccatgaggataaggacttttctccttctagtttttctcagtgcttagaacagtggggcccaccgtagactttcagtacttggcctagttaatgaataatttaaacacaccagcatgttcagatcagtatgtgaggatgtttactgatctgctgtttatatggtcctccaaattctcgctgtgctctaagataggtgaatgaatgtttgaattgattacatatggaaaaacagaaaacactgtagccggtgatggtggtggtagaagcttttatctgattaagtaatagtataaaagataggtttgtttaattcatattaagtgagtttaaaaaatacgactattttttacatgaagaatttctaatcactgaaagtggatcagtcgctactgttttgttatgaaattactgtaaggatgggaaagatagttttacatatgataattcctggaacaacacggtgccttagagattctcaatgagccaatttctccaggcattttttaatttgtaaaaaatcattttttttcttacgtagcttcttgttacttctccccaagcaccattcttttgggcaaaaacatagcacactaagtgtttttgatgattggctagtgtatttcctcctgactgtcaccaaaatcagtataaacctttggttaatcttttctatctctttactgagtcattagatggagtatatttagtactgaaaatagttgcagcttgcttgtgtttccctaagagaaatactgtctttacaaatggaaataaaattttcactcatttctgcctttataatattttaacatttgtataaaatcctctgaactacctttgctgatgataaacttctttctgtgaacaatgtttctttgattattaacccccaaaatgatgagttttcgtagttttttctaactcttcaatattaaaatggtttggagggatgcagaataccatctattgcttacatttattcagacattttaaccaaaatcagcagcacagatattatatcaatgtaaaaaagattttaagtgttatataattagctgatttagaaagaataatattttattcattttttatgtttgatccagatcaaacagtgtttgctgggtttcagaatacgttgtttttaatttgagtttgagctcaatttggattaaacttgatcaggacaggctattccatttatttttatacttttatcttaaaaggatatcttggaaaggatcttagctatcatctgttgaacctctttttgctgagaattatggcccagagaggagaggtgattttgcaaaggtttcaccagttaatggcagagctagaactagagcccaggcctccttagtgagcctccattcctgtctttgatccctgcatgtttggccctcagtttgggctttacatgctatgtgtagatgtttggtaaatttattattctctgaagttgaattttgacatacaaatcactaaacatgctttgtattttaaagacattcagtgtctaagaagaaggtgagttcaagatctgcctccccccattttgtgatatgtataatctaaatgtgtttcttaaaactggatgcaaacaattttccaaccatgtgccatcttttagtttcaaagataaccacatgatagtgtgtcaatagagactagagttttccaaacccatctatttttgtgacctgtctcttgtgttaataatgcatatgtttgcaagacagctggctgagcttttgacaatagtctgtccctggattctttttttcctctgtgcaaagctaaatgaaccatatgggaattgaactgataaccttggcctcattaatttaccttctgtaaaattgacttttgtaaatttatgttctactgtaatgagattaggagtgtgatttcattcactcaataaatagtaccaacactgggctaaaggcgttgggaacacagagatgcatacaataaaatttttgccctcgagggattaggataagtgcacaagtcactaatacaagagcaagagtggtaactgctaaaggagaaggattagcaaaatgtgaaggagttaggagaagggagagtggtacttcatgctgggggaacatcagggccctttaatgatggacagggtttccagtgggagtgagggagaggaaatgctaggtcctgtaaatggtggttgaccagaacacttcaacagggatgttggcatgtgctgagcataaggttaagcattatgattagaccctgaaggagaagactgatagtagggagaaagactttaagtgtcctactaagatttttatttatggtggcattcggaagggatgattgaagatttctaagcatagaagtaatacagtcagaacctttatcttcagattcgtcagcagtcactgtagaatgaactggaaggaaaagctagagttatggaagaacccttgggaagtaacaagggcctgaaccagtgttaccaacagtgggatgcagagaagctatgtgagagtttgcaaagctggactgagcaggacgtggtggtaactgattagattggatagttgaggaaagagtacaaggtttgaacctgggtaactagcagatggcagtactctttcacaacatcaaaatctggagaaagaaagtaaatattgttttgagcatgatatgctcaagaagctaataaggcagacttgaaattggaacacggggtagaggttggagctggctgtaaggatttggaaagtcattcaccaagcgagctgtttgaagctaggattgtggatgagatcattaagggatagagtatagaaataaaagaaaaggaatgaatgcataagggtcattctggcaggggctgtcagggagtggagatggtggcagggaacagagcaaagagaaaccagaagatcagctaggaagcttctgcagaatcccaggtaagaggtgttgacagctcgaagtagatggtgctggaggagtgtttggagattgatcagaatctgaatatgttctgtggataaaacgaataaaatttaacagattcagggctaggggtgttgtgtgagagaaagagaagggtcagagacaagtccatgctttttagcccaagcacggactccctgccttaatctaaacatggtgttctcctcatgcaggtgtctatgttccaatttcccctgtatataataacatcagtcctattagattggggtccaccctattccagtatgacctcatcttaactaattacatctgcacaaccctaatcccaaataatgtcacattacaaggtactaagggctaggacttcagcatatgaatttttgggggacacagttccatccatagtagttgccgttaactgagaagaggatatctgtgaaatgaacacgtttggaggcagggaaagatctgcaattttgcccatgttgaggttgaggtgcgtgttagacacccaagtggagataccacgtgggcagttgaataaatgggtctgaaattccagggaggggtctgggctagagataaatatttggaagttgccagcatattggtgatattgaaagccaagagactagatgagatcaccgagaaagtaagttgggatagaaaaagaggagagttccaaagactgaaggtaagatcccaataaaatagtactgggatcaaggcccacagaaatgtcgaataaaaatcccgcttatgcttatagttgtgaaaaagcaattacattttcatgatgattttaagttatattctaaatatttacaaaaccgtggcattttcttgtgaagtgtaagatgagtcagacagggtatggattaagttttactggctaatatgttgaagaagttactggtgcagaaatggaatgttttgaatgccataaagaagtcaaaggataccaataaaaataataaagagcacttttctcagaaggagaaacaactttggagaacattatttcagtccttgatttaagaagtcattttctagaaaggcagtcatgctctaagcagctgtatagcttgttctttcctctgtttttcgtgagagtatagttcaaaatactttaaacaaatattaacgcattattatcacattttagcagacttgaaaaataaatcttcactgtaacataaccattttagccttttcattgacatttttccatgtttctgctgtttggcttggaggcaaaagctttgacagcaaggtgatagaagtgacatacagcaactctatccagttttctgagcccatccagctcccatttctctgagcccccttctgcacattcttccacctctgccccctttcttactctggctctcacctagtcatgcttcaaaactcaggttagctgtcacatttcgggaagtgttttgtaattcctttattcatagtgtgctgcccccgttaccctgcaccatagtgcttaccatagtgcaccatagcactgaccgtagcgcaccatagcgcttaccatagcgcaccatagcactgaccatagcgcaccatacactgaccatagcgcaccatagcgcttaccatagcgcaccatagggcttaccatagcgcaccatagcgcttaccatagcgcaccatagcacttaccatagcgcttaccatagtgcaccatagcgctgaccatagtgcaccatagcgcttaccatagtgcaccatagggcttaccatagcgcttaccatagtgcaccatagcgctgaccatagtgcaccatagcactttccccagttctactttatgaagtgttgctactagatcttcataatagtttatgcccccaccaactttgagggcagagactggatttttgtattttttctcttggtatcttgcacaggatctgcaggtaaatattcaagaaatgtatgtgaactgcaaattgaaaaatcaacttgtttgcctgcttggtacatatctaaactgtcactgaactatgattccttatcagaagttaaaacattttgtttagggagtgtcatcaactaacacagtactatataatatatcttgagaagattccccttaaaaagtattcaaacagattgttgcctaaagggttacatttgtccctaaaaactgtttcccagagagcccttcagtttcttaccatgaaagatacctgagatatttaccctgtttggttttttgttttattattggctgtgtcccttcaaattagaaagcaaaatgaaataattagaacacatctatataagataacatgaaaaaatgcgggagcttagagggataaaattactggcagttgagacaagataaaatttttttaaattagtggattattttggaaaggggaggtttaaaatttttttggcataattgagatctgtgagtctgaagagtgttgagtaatattataatagctctttgatgcaaaaataaaaggacagcaaatacatccctgatgacttggttcaagattctttgccctgcccacttaaagtgcaaatagtgtgattttttgataaaccttctccaaaaataggaaaagaaggaaagagatttacatttgattatttcttatttctcagtactgagaagaggctttgctacacaataaccttgatagcattgctccactcatcgggttttacctttattttgctaagtcacatagtatgtggtcattacacactgaattcttgtatcgaaccatgattattgacaaattttgagctaagctgtgcagcatgttaaatgtgcctttacggtgtagttatttaaatctcaatttctttccccagctctactttacgaagtgtttctactggatcttcaagaccttcaaaaatatgtttggtgtgtggggatgaggcttcaggatgccattatggggtagtcacctgtggcagctgcaaagttttcttcaaaagagcagtggaaggtaaatgttcatgtgggtgttccttttacatattttttcctagtgtgtagtttacttgtacagctaatgctatagcattattgggaattcttcaaaaagatttttgatttaatctgtcagtgataaacagtaatagtgccttgtataaaaaccacctggagattttccacaaagcaatatttaatgagcaaaatttgaaattctgagcaaggatcaaccaaagaggattttttgttgtttgtcacagtttgtttttcagtaagactcagaaaaataattccttgtcattgtaaatttaatttatgtgatctggaatagaagttttactaggcacacacagaatacatgatttctgccttttctgggtttctgtataaatatgtgtttgtggcaaattaaaacgttaatatcagaatcaagtctgtgatttgtgtttcatacagaataatttcatttaccagctggttcaagctccaggtccctgtgtgagtctcacctttattcctcctgaaagtttccaaattttgcatattaaatgaaaaacctgactgagattcactatgcacagttaggctagcttttgcttctgccccaaaatcgtactccttaaggagaaatggtctttaatttatttttacctttccccatcctcacttataagcagttagttaccatcagacttagaccagatggttttattgatgttgcaaactatgtctggtgaaagtgtagaatttttgctattagtaaaagattcattgtgtaatggacaattacattcactaaggggctccacatgaagactccctaaggtttatttctcagagaagttttcttagagatgacttggtgcttcagaagcttaaacataagtggcttgaatgttttccctgtgttttgccagagaccacaaggtcatatctttagttgtggaatgaaaaagttaaccaagtaattattctttctcttgagattgattttgcattaattgatattacatgatttttacattatttacacaattaattatttggtagtcctcaaacctagcattgaattggtaaaaggagctcagtaattctttctcaggattatgagctcttggttacaggtgatagaaaatacagcaaactggcttaagcaccgatggaaattcattggctcacatactggaaagtcccagcgtaggcttggcttcaggcaagccatggtcttaagccaggtcgttagaactcaatcccgctcgctcagtcgcttggttttgttctggctctgttctcatgcacgttctctcatggtgctgagacagctaccagacctccattaaaaagaggttttctgttcctagcaattcctataaaagctcccagtggaatctcctcagattgaacttggctcacatgcccacctctgccccagtgcctgtggctggaaaatgtagtgatcagataggctggttctggctggagtcggacaacctgaaccatctagaccaagaatggggaaggacgtttcccttaggaaaatgtgggttctgttaccagaaggccaatttttcagaaagtaggaaaaataaatttgcacaatactgaagtcagtttgcttttgtgaggcttcccctgcctccttctctctttccttaattagatgattggttcagtaaaagataaataggtgagatttacatctggcatctttctaaggccactttgtgctttccaatgtaagaattcctctttctggctcacttaattagtaaacaaagtaagtggtatgtcaaaataaagtgatgtggagaaggacattttggagcaggcagttggccagctggccctacctgtagatccaccttcatgtcagaacccacattttggctgtttgtagaatctgccccttctctacttctgaagcaaaaggtttctagaagttcttgcttagtttttcttgttttaagtagtttctgtggaattacctagggaattatttttataactcagttataaacatacaaaaacctaaatgcaggtgcaactttttccttcattggaaagctgatcgatccatggataatgaaacttggtaaatgccttttaagacttgtattaatatagtttattttgtattgatttgggaattagactttaatcattcacctgcttgaaacaatgctgttaatttaaaatctaaaattcatgagagtaaagacctatttgtttttgtgtttttgtattttttgttagtttactcttttatcccatgtgtatgagagagattaaatatgtgaaaaagatggctatctttatataaaatattttttaattaatgagattatttttataaaactttataatatttgtaaaactcatttcacaaaatcatggtatataggtgtcattttattttccttttctagatgaagacatttaggatcaaacttagtccacccaatctattcctaatcctaaggccaaagttagacccttactcaagtcataggactccaaacctacacctaacctaaagtctggattctaaatctcataatatagccttgctattttgccatatcagttcttgagttcatgaaaattataacctatatgttagtctattcatgcctccttgactctaataaaggaagtgatctaagcactaagaaggcacagtttagtagtcttagtctgtgtatatatgtgactttgtatgtatatacatatatatgtatggatgtatgtttgtatatttaaatatttactaagtttgttttccaatgtcccttgacatccctaagcccctcgttagattacagaagcagagaattctgggcaaagtgggtagagggagctgatttgagggaagtcatttaaagctaaaaggaaataatggcaccaggaacagaacatgaagataatccctagagagcagacaagaggaaaaacacaccagcctgagttttgagttgatgtccttaaggctttatgatctagagtgtgtcaccctaaagcttgctataatagcatagcagtgactatgcagactgtaaattatgattttaaagtataaatttttgtgtgtgtgtgctctgtttaatgggatgtatgtgtgttcttattttcttcttcttaaacatttaatataaaaacacttagaactgtcttccaaaataacttatttgccaataatgtcagttagtagccatattattgtaccttacaaatggtttatacgttcattttaaatttgaatcacttatttgccttgaagattttcagaaccttcctgtcttaaagaaataataataacttaaaaaaagggttctcccttgtggtggaagctagactggcttcaagggtcagaaacctagttttaattttttacgtcactcactaggtgtgagattaaggcaagttatttaaaacttctctgggcctcagtttctttgtctataaatggagaagtagtgttgccctacccgaacattgctgtgaaaaattacctgaaaatgtttgtacagattttataaattataaagtagcaccaaaatactagattattactatcctctatgaacaaatgccaaagttcctggtgatgttcacgtagagagatgatgtaaatgatacaaccacattgagttgttaggtcgtcatttttcagtccttcattttcctttgttagatcttcattattcctgtaatgttattttgtcctgagagctgccctttgaggtggcaagatccttctaaactagcagttctcaaaggctgtgtgtggagaatggggatctgtggaaatgtcctagaggggcttttccagtgcagactgaactgttgagatttactcctgtaacaagcctctgtggcagtcccacagttgggagtctcacagttgagaaaatactgagagccctcaaccaggctttgcctcttctgttagaagtttttagagaaggcagagtcttatctcaataatctagcaaggctgtggatatttagtagccaccaaataaatgtttgaatgaatttccatgtgacataagagcaatcaaggttggatgacttcccccacccagtaaattgtcaattgaattagctgaagaatttgtgtaggccttttgacttctaatctgtaatttctcatttttgtctgaattttgactttcttagtttctttccaactgtaaattgccattagttccatctcatctgtgttttttactttgtgattcctcagtgaacagagttgactagattcagcacactattttataacctaatttcctttttgaagactcagtatgtatgcagtgtctggaagacacagctaccacaaatctctaaatagttatatggctgtaaaagagaaagagagctcattattatgtaaagtcaactggatttaaattgtttaagcagacctaagagtccatattttggtaaggtcagccaaattgtatgatgtcagtttccacactcacacatttcccttgaaggaagagacttaggtctatatcttgaaactaaatggctgtaaaagatacaattacaagttaatcttggggtttttcaaataggcaatattttcagacagccaagcctgtgaacgagtacctcatttcttttccatgtagttcagttcacagcatacattttaaagatctttaaatttatgattgtgtattctatgagagaaaatatttttaaggaaatgtagtggtttatgaatcattagttttctttggttctttaaaattaatgagtaaactgaacagttccagaggaaagtgtgtttcactgtgtcataaaccacattatccctgtcaatgctgtgtgtgcacacactcatgagcaagagggaagaacaagtgagggtgccagcaggtgggaggtgtgtgttgggggggggcagtgagcatttgtgccacaaaacagagaacttcattgtagtggactcaagctaaatcagaatgttattaatattaatattacgtaataattcaaatatagctatctccttatagctggcaatgtacagttaactgataaagtagggggaataatttaatgtatatttattagatgtttttaattaatgatttaagatacagtccctggtgtttccatgaatcatgtacaggaagcttatgagcatctgagcctattgtcacaaccacaatatttgctgtgtcagatataggaaaccaaggactgtctgcttactgctttcttatgaaacaccttaaagatattttttcttttctcctttttcagaatttaggaaccaggtaacctgactctttctaattatttactgtaagagcctaaataaatacctacccagtaggttatatctatgattttaatgaacactcctttcctccttccataagcataaggctgtcgtgctaatggcaaatgtttgcccagatgtgtgatatcccttcagttggttgttatgggaacacatagagccatgacatttaggccaccctgaaaggtcagggaaggtttctccaacaattgacccccatgctgaatcttgagagatcagacttggccttgctgagggaccttaagaacagactgttgttgcacagggcaccagaagcaattttgtgttaccactgtataaactttcatatgtgaagtgataggaagtgaggttaaatgagcagattgggaccaggtcctggactccaaggaaggtctgaattcatccttaagcaaaacagaacctctgaatgttttcatgcagcagaacgataagctcagttttgcacttaagatctggctgttgtgaggtatacttgtttaaatggtggctgttttcatcacttgagctagaaatgacctaggatggacctagaccagggctatcagggattgagagggcgggcagatagtaagaccatctgaaaagtagcatggacagctctatattggaagagaagaagcaaagatctaggatgactccccaggcttggctgctaacgccgttcactgagataaggaatactggagcaggggcagctctgagggcaagggatgaaaggttcatttgctcagcaaacatttactcaatacctactaaatgccaggtacctttctaagcatagctggagacatcttggacaacgatccctgccttggtagagcttacattctagtgagggggtgatgaaaagattaagcataacaaatgagttatttatgtaacatatgaaaaggtgattggctatgggggaaaaaaaccattgttaggataaaggggagttggatgaggtttggtttaggacaagtttgaagtacctatgggacattcaggtatatctaagaggtagttggatatctaattttgaagcttgggaaacaaggcaagattaaaaataaggatttcagaatcatcatccatgaaagtggatgcagatggccaagaaatcagtattcagagagacagagcaggccaacgttagaaccttaaagaacataagtctagaacattgagtgcatgcgtggcacacgtgtgtgaataactagtctctctccttctatttccaacttgcacacagaaaagtcttagttactttgatgattcaccatttttgctgaacttcagacattattgaatctatgcagttttcaatcctaggtttggttctttatcattatgccttgattattatgaatgttaatcagcccagagccccaaaccaaacatgatattgagggaatctggtttgcaaaccagtgcagaggcaacacccagcttgcagcaggtgctcagagaacactggttgatgtgttgttggtaactacttatgtgaatggggttcgcccttgtttctgtcaccatgccacttgtttctccaaagtggaaaatatgttgaagtaatttattagaaaatgatttgaaatagggatgtgtgagccaaaagtaaattagtattatccaaagacagctgcttgtagcttaaattttaaatcaaggtacaacttcacatggcaaatttgaaaactctaagtcaggagcacagtatgtaattttgaaaattatttcccaagtttatgtgtttgtttacaacccatcttgttccagaaaataatccaaggtggctcacagatttccatgagtcaaaatgaaatttaagtgaaacaaaaaaaacaacaggaagggaagattagagcaagagagggaaaaactgagccaagaatggagatgatataaagaatatatgtctcaaggcctttgtcgagtctggccacttatttggcactcagctttctagcagtcaacccaaagccaatgaacagtcacctgacttatgatgttcttaaaaactagtttagggaattgcctgtttataagaaaattttcatgagctactttggttttaatgtgcctgctcttttcatctgatttgtatcctaagatttaaaaagtaactctcccattggtactaatagaatagtttggtatagacttaagtagtggttttgagaaaaatacttagttctgtctcccacctggtcctataagaatagctactgagtacttaccaggtacaggctctgtgccaagtacttcatattttatctcatttatttctcataatagccttcttaagccaaagtttcatgagtttggaaaggtaatatcgttgaatctaaactccctcaacaattgttgtcatagggaaaacattgactatttcttaacaagacttaaaggtatgatcctttaatttttaaaaataataagtatttattgaggagtttgtgctctttacgctaggaacttgattgtctattcacattttaatcctcttgataattctatcaaatgtgtggggttattatctatcctcattttagagatccatccactgagtcgtgcatgtagtaaataacttgtccaaggtcacccagtaagaaggaagagatgcagttgggatttgaacccaggcagcccaggccttctgattgtatgtacttaacacatcagctatattgcctctcacagagtaatatcagataccaactatttttacccatcaaaaagtagggcaacaactctggctttagaatactcaggaagagcacattataatttaacagttatcttgctatactctaaataattaactcttacccattccaagttgaaaccttaatttgaatttctgttgccttagtggaaaagaaattgggtaatctctattttttcttaaggaatgaacttcatatataaaaaaaattaccattactatcctgaagtacctctttaacatcttgatattaatctaaagctttatttaaaatttttatcttcctgtgtttcatttcctgtgtgtgataaaaattagatgtagcctatcaggctcagagaaccattgggagaatggccttcctcatacaaagctgaatgctactagctctccagctctttgatgtctgctctgtgcctagtggctcagaaaccatacccaagagtcctaggacatgaagctgctctcagagaacttgcactcgtggtgtagttatgatcatataacttgtgtgatttgatgttactgagaatgatttgacaccagaaatggaaattgctaaattgactgtcatcaaatactaacattgagccttggcaggatgggaaggatgggtgggcatttaggttgtcatggagaggaggcaggtgatggaagactattagatggagactgtgttgggtgcggtggctcacgcctgtaatcccagaactttggaaggtttaggcgggtggattattagagctcaggagttcgagaccagcctgggcaacatggcaaaaccccatttctacaaaaagaacaataacaacaacaaaaaattaggcgtggtggtgcatgcttgcagtctcagctccttggggggctgaggcaggaggattgcttgaacctggatattgtggctatagtgagctgagatcacaccactgcacttcggcctgggcaacaaagtaataccctgtcccccactcccccccaaaaaaaagaaaaagaaaaaggtgatggagactggaggctgaggacacctgcttgagcagacccagctctgtgaaaaaggaggaattggcagcactggatggtggatcagttctgaggaatgatggcaacctttgacagactcaggaagaaaatactgaaaacagttgaagaatagggcagatgagtggggtttagaactactgaggcttcagagattagtttgccaaaatggatgaagcagtctggataaacaggaatacaagagcagaaagacaaaactttgaaaaagtttatcctcttcctggagttgttttcttgcaagttttaaaataaagaaactacatagttagctactaggtagtttggcagtagattggcttagccagatgtccacggcatttggggtcatttggtgcagtgtatgggaagttacgtaatgaaattaaaagcctggggaaggtgttgggccctcagtagcaatggaacagggctgcttggtgtcgtgatcactggaaattgtgtgctgttgtcagtcctcgtgttagagctactaaattatgattctagcagcttatgacaccatataaagccacaatatgaagttattaataattgagaaggcagaaaatttctgtgtagcaaataaaaaaagatgtcagtctttcaaggcccctggttttttcatgtaatattttgctctttaaagacatacacatgtagtgtaatagttctttccttttaaccttattcctcaatatctatatatactgcccttcttgacttgttagataggaaaaagagaagctgataatgagttttctagagataagtagttatatgtaaaatataaatacattttttccagagtctgccccacttagacactcggcactgttctgaggcaaaggaacagaggcaaaaccttgaatgttagccagaagacttcagaaccaccagaaattatcgtaaaattacctttgcacatgctcacattgtctctctccctctcatctttctgataccataaaccaaatccacatcaagaaaagaacaggctgacaccaaagaacggagctcacaactcttgcaatgccattttgccctcaggttggccctatttgaagctctttaataaatgctagctcttagaatttgttgactctaacattacatttacaaaagcgtcaccttcctgtgtgtgctgtcttgctaattaacagtgaattcttatacctcacctagcaaagaacaatcccaaggaagagagagaaatgtattttctccttacaggtataagacatttaaactcacacctctatggagtctttaatgtctttactagagcctttagcttcattaaatcaccgacattcgacaacagaatgcatctttataaaaatgtttacttttctaacagcgaaaacatgaaataaagcaaaagatgaaagaatacaaatctaggagggcatcataactatcaacaagattgaaaggtcacttatagcaaatcagctgaaaagtagatggtatgagatttttgataagtctgatataaattcatacttatgtacagtattctagatctagtacaggctcattaagttctttttacttgtttcagtggaatcaaaactatagaatttttttttttggtcggggggaagcaaatacctcctccttcctctcaatccctttttatattttattttcttcttcaatttgaaaggaagacctagggctttagtttggagattcataccaccctcttagaagccgtactgaccatttactagtatttagtgaaaggctgactaacattttgaacccttgctttgagagttttccagtaagtgttatcactggtgtataataaaggcggcaccattgtaggttccaatatcatttttatatagtgttatacagaatgatactgcccactcagagactcagcaaataagtctgtttccttgtctgtaaacaaaatgaaaatcttcaaagtatctgccctgcccatctctgagttagaaagataaaaattaacacacatacgtttaaactgctttagaaacagcaagggagtgctttataaacgttatattttaaagagtttttctttgttaagtaatattacaccttggttctcaataaaatttggaatatttaaactgtggctactttatgtacatgttaaatatttgatttgaaggggaaaaagtaaaaattgcagaaaaacatatgttactttagggaagacctggagtgtttacttccttgtcactggtttaggtagatctctattgtttatgaatattgtgctaaagggccaactgagaaagccgttgcatttaagaccaggatttaaatttagtttgccccaatacagaaccagacaaagagcaaagatagttttcacgctctttctgcatcttaaacaatttagaagatcacaactactttttacttccttttttccctttaattaactgtaccaagatctctaaaacatattgcattctcttaccctcccacaacttaattggaaaaccagtgcaggattagtctaggttggtcatttttcatctggcctgcaccatcacattttcccagctgaactgggctcagcaatttgatattgctaagattacataagttttaattgttttgttttttagaatacaatataaactgaaagcacatttgaaaaagaattggaatgataagagtattagccattaattagaaatcttaaataaaaatcactgtttccaaggagaatggtcgatgaaattgttatagtcatgccatttctaaatattagatcaaaaatctcttcaacctccctttcagttttttaaattaaatatcacatgatttaaattttttaaattacacatcagattaggatttatttgaaaatcataagttgttatcactagtgatacttaaaattcaaaattacttatgttgcatctctaaaatattgaaatagctgacctttgcctaatgtaaccggcatctgacagaccagagctatagcagtgactgaggtcagatcacactgaatcatgaaaaaccaggttcagaacttagaacatcaacccatgagcaagtgctgagaagacacatgatggggtaagggaccaaaagggctagagccaatttgggataaagcagtaaccggaaatggaaatggaaagggcaacacttcaagtccagagccagcagaaaccaggcacattcattcaattcagcaacagctgtggagtgcttactatggactaggcaccaagaatgtgctgtggtccattcccactaataaaaaggcccacggatactagattccacaattgactttattctcagcagtgtgcttctattttttaaatcatctactgtgtcttgaaaattacctgtagagcagactcatcatattgggccttaggaattaactttgtctttttcagtaaagcaatacaaattgcacaaaagtcaaatagaagcaggaaagatttcccattttacaaagttgcccactactgaactcagttcactaggcagaaaattggagttttcagatacgggtagctagtttctttatcagactaagttgtaatttatagtagtgacccattgggatgagatgtgaacaaaaaagaaatgattttagtaggaaaaattaacctctattgagccgttaacacattctctgtaaaaccagaaaattattgcatttttaaagttacttgaaaatttgagcaaattacatttcccatcgtgaggtggcacatcgaaaagtaacatgaaagtatgtttctccatttatgcaggaaaccagagtaggctttctgttctgtctttatcataacttaccattacataagtactaattgtgcttttctctttatcctttttttaactatcaaagatgacctgacattacattttaaaaaggaatagtaataaaagtaatgctaataggcattaataaaaatcactgtttttataggagactggattaagaaatacttataaaatatcgttactaaatggttttagatataaagttcctttaagcaacttcccttttaaaattataaaattaggccaggcacggtggctcatgcctataatcccagcactttgggaggccaaggcggggcggatcacttgaggccaggagtttgagaccagcctggccaacatggtgaaaccctgtctctactaaaaatacaaaaaattagcctggcgtggtggtgagcacctgtaatcccagctactctggaggctgagaaatgagaattgcttgaacccgggagacagaggttgcggtgagccgagatcatgccgttgcactccagcctgggcaacaagagcgacgctccatttcaaaaaaataaaataaaataataaaattaaacatactcctaacatttctgattaggatttatttgaagatcctcagttgctaactggactacaagaagaatgtgatttcagatacttgtggatatgataccttcagtagtgaatttttttaaaatcctcaactctgtattaaatattttttacagttactgaaatttgtttaagttgaaaaattagcaaacattttcaccttgtaaacaattttttctttagtaattgtattatgatattctactatgcattataggtgatttggactttttgttgcttgaggaaaagcaattactgaagacaatattattatgcagaaaggtgtgtacctgaaatgcagtcattctacctgttgtagaccagtctttttaaaaatggaaatggcctcatatagtctcatggagagagccctctgttttgttgttgttgttgttgttgttgttgttatagcatctgaccagggaacaccattcgtttcttacacttaggcttctagaacatattgtgtgtacccactcattcttattggatggctaattaagaaatcagtgggaaattaatcccaggcactgatttattttattttacacaagtaaatcataagataagtattcttcccactgcttaagatttgattaaaatcttatagtaaaatagttctgtcatatgtaatgtagatcatacaaaattttcttcatacaaaatttccatcgaaaatgaaattctttctacatacaaaattttcatcgaagacagtatttccaggttcagtctaataaagcttaatgtttaaaggttttgcttgacacctgctttttttcattttaatagtaattgagactacaggatagtgtctcatttcctaggttcagtttagatgtactgggttgtcatcagaatcatagctttaggaggctatgttcaaattccagtgtcaccatttacagtagtcatcagttagcatttattaaatgctactgtaagtctcgcaccaaaatggacattctgtgattttattttctgtataatttctgtagaagttaagcaatattctaatttttgatgaggaaattagagaaattaagcagtttgtccatagttacacagtgaaggacagagctaggaattgcacgcaggtttttctgacttcaaagtgtttcttattttatttcatcatgtgacactcctggccctaggactttgggcaagatacccagcctctccctgattcttaactataaaattaagatctggtaatacttagcttatcaagatgcttcagtgattggagatgatgtgtgccaagtacctggcacattgtagacattaaataaatgatcgctgttcacagtgctcttattacttgtcagactggacatgtgccacataatatgcaaagctgttatttgatgaaatagtatataaaatgtcaggggaataataatttttatgtcagattccaacactacccggctcctccaagcactaaacataaaatgtgcatttgaaatcagtaaggggctgcttcgaatcctggtgagaaaaaaaaatcattgaaattggatgcagacatccacaggcagcttttccagtttctcagattgctctgttgtattatcatatagggtgatggatgacattaaaagctataacactattttgtagaagagattcactgcatgatattaggtatgggcagagatcaaaagtcctaaatgtaatttttgtaaaaggagtaatttaaattctaacttgcaacaattttaccaaaattctgaccatggatacttaaaaacttttaaaagaaagagaagataatgcaataattgattttaaaaaaatactaggctcttcctctcccttcaaggccaggtctttagtaaccagatttgttgacagcctgtagtagcctaagttaagaccctgcatgtgtgttcctgggatgaaattgcatagtgaaactcatctccctttccttatgcacagtcgtatttatgcatgtggtcatactagtaaacacttgcaggtaagtaatttaggcaagatctcacagctataaatgacaaaacttacactcaagcctgaatctgacttcagagccattgctggtatcctgacaaagtagctacaatttcgagtgtagcatattggagaaaagtggaggggagggagtgccttcggttaacaattttaaattgaagtttatttacattgtctaaaaacatatttttaaactttcagcagtttttcctagaaatacctgggatggacacccttctcaccccaaaacctatgtagctatccggccctcaagaagccaatatgtacactaagataaagggcgcactgtttactgaggatggctttcgtgttactggcgttttaaacaaaagaagtcagtaaatgtctcaggataggatcataggcaccatctgttgaagtggtagttttgtcaggagttaactgccagctccacctgtacgtggacgtcactgctggtacatattagccagaatttactgtgatataaactcattctcttacttaaaccattgtctgcctctcaagccaacctgtcttggtaactttgtacatagtaccacttgcaaatgacctaaccacaggaagcttttcagatgcagaaattatggcagcaatcatacagcagttttcttaatgaaatggtaccaaagccatacttggcatgatgttgaaatccacagctgatttgcttttcatgggtgccaaatgctctatactatggtaagaaatcatagcggctgcacgtttttaatctatgaatgtgtcattgtatattttctttgacagcagggtagcagggaactactcatgagctctgttctgagctgttaagtgtaccccatttaaagaaaacccactatgtggaaattgtatttgttaaaatgaaaattaactaaatgagtctccaagtggcatataatattccttagtatataaggaagtgtcatggagccctttgaaatccagtgaagcaagtctggtctcaaatggaactcgaaagcatattaggtggatattggaaagccttttaaaaagtaatcattgaggcagtcaaataaagtaaaattaacttcagtctgagttgtaataaagagcatattagtggtctttgtggagatcctgtttatcatgtgaccctctttcccaaagttaaagaaatgtctttagggctgagccacagtggttcatacctgtaatccccgtgctttgggaggccaacaggagaggattgcctgaggccaggaattcaagactagcttgggtaacacagcaagactccatctctataaaaaacaaaaattagccaggcatggtagcacacacccataatcctagctactcaggaagctgaggcaggaggatttcttgagccaagaggttcaaggctgcagtgacctatgatcataccactgtactccagcctgggtgacagagtgagactttgtctctaaaaattaaaaaaaaaaaaaaaaacctgaaaagtatgaagaaatcctgccacctaaaatagtaaccgtcctgtaaccaattaacgttcctacctttattagaatcattttaatagtatttttgtgtgttaagttagtctcattgagtacacataaaacttttgatttgacaaaatgtcttggaaaatcaaatgtttgaagcttaatgtgatagcagttcactcactgatatacctcagcttcttatatatgcaaactgtttctctttgtaatagattttaaatttcttatcctaaagagaagttgatttgatgatacatttgcattggttaaacagtttttagtaagtagtctttcccctgcttctgtgagaaaatattttctgtaaaattttagagaaaaagaatgaggaagaaagagaaaatgtctatcctttaagcatagcagggaattatatgacagctaattatgttgtgatgttgctttacttgtccagtaaattcagggcccacaggaatcaagaaatctgtatgctgtggacccctctcacatgtggctcacagtttagtggaaagagagtgctgctcagaagatgctttatatgtatgcatattcctacatttattgcatttaataggattctagattaagattctgagtcaaattattttaagaaatgttgccagattgctttccaaagatggaaataattcacatttcttccagtagtttgaggacccttcctccatccccaccagcaacagatgccgccatctccttactttgtgcctgtttgataagtgtatatcattgtagcagttttcaatggtgataaaatacacattagatttatcatcttaattattttcaagtgtacagttcagcagcattaagacattcacattgttatgcaaccatatcaccaccatccatctccagaacttttttcatcttgcaaaaactgaaaatctgtacctattaaacacttaaatcctaattcctcttccccccagcccctgtcatgcaccattctactttctgtctctgtgaatttgacttctctaggtacctaatgtaagtgaaattatacaacatttgtccttttttgactggcttatttagcttagcataatgttcttaataaaatatttttatgatgaaaaataactccctacaatatgatttgctgtagtagttaatgatgaaactctgtattttcatagcatccatttattcacataatcatgaaatatttgttgaatatctcctgggtgtcagatgctgtcattggcactgggggcagaggctaccactgccctcacagagaataagttctagtgaggaagacagacaatttgcaaataagcaaacaggtaaaatagaatgggtgggggaaggaaaagatgatccgatggcgcaggtaaagtgcaagggaatggttatgttagtcagtgtggtctggagaggcccagttggaaaaggagcttgagacttggaatatgagacacacgagagcttaaagtgtgccctggcacggtgcaaaggccctggggcaggaaggaggctagaatgccaaagaaaaaggcaatggctaatgtggtatggaagggagataaaataagtgtgccattagagttggggcagagacttaagttttactagatcatgtagggcctcaaagccaattatagggagattagattttatttttccccttttttttttttttttttttttttttttgagacagagttttgctctgtcttccaggctggagtgcaatggcataatctttgctcactgcaacctctgcctcctgggttccagtgattctcctgcctcagcctcctgagttgctgggactacaggtgtgcgccaccatgcctagctaatttttgtatttttagtagagacggggtttcaccatgttggccaggctggtctcgaactcctgacctcaggtgatcctcccacgtctgcctcccaaagcgttgggattacaggcgtgagccaccgcgcccagctggattttatttttttctaaaggcgttgggaagcaagccatggaatgattttcatcctttatagttccagagaagtatggcacctcatcctaacaggaaatccaggaggcagtgagaaagattacaaaggcccgtggccaggcacagcacttagcagctctgcattttccaccatttcccaggtgaggtaactaaggctgaagacttgcttcctgcaatctcacagcagcaaggacgggcagatgtgttcctttgttcccagacctttagtctggaataataggagtggatggaaaaagtgtttttggaaagcagacctcaacagattttacatcaggaatagttctgttcctataatggggagctataggtttaagatacaagtccatcacttctgccacctgacctcacccttgaccccgcccctgtcgctgtatatttcatactctgccctgggcattctggcatgagcctgttgaaactagcatctcctagcaatgagagcctccccttaatctaggctggctgcttttgctacaagaaaaatgtctatgtattctgatggccttatgatataaggcgggtggaatgtctggttaaaatacttgaaacatgcactgtccaatgtggtagacactggccacatgtgacttttgaacacttgaaatatggctaatctacattgagatgttctgtaagtgtaaaacgcacattggggtttaaagacttgtatgaaaaatcaatatatataaaatatatatatttatatataaatatatatataatttataaatatataaaatatctgataatctgataatttttatactgattacatttttaataacattaaatttaattacagattaaattgctaatattttggctaggttgggttaaataaaaatatactactaaagttaatttcacctacttatttttactttttaatgtggctgtgccaggaaatttatgatttgcttctgtgctcttctgttatttgcccctctggccccccacacacgcacacacatgacctcctgctgtgcttcctcactgcacagccatgtgtgcactaactaaaccccatcatcgtgaaagaggaggggagaaaaccagaccccatcatgatgtgttctctgaagcttccaaagtttgaccaccgaggaaaaccacttgaaaatgtgtccacaaaaacttcgaaaaggttccattctcccagacagcagggagtctttcctcacacctcatttttcacatggtgttttcttcatcttcccatataccaaaaaactgacaaaatgttttcataaactgtggacctcataccgcttcttacagccagatataatgagcttattagcaagttttaagaactgtgccttctggtggcctggtggcttccaggcacttcctggcaactcgccagttgcctgtcctctgcatctttgtagttgtggttctcttcacattttagaaacttggagtatgcagaagcctccaatggtccctatttaattctggcattactgtcagatagccttcaaccagaggcagaggggcagatactcttcaagagtgtgggtaggtgagagagccagaagcagcaggcaaaggaaaggtagccccagtgctgaactgaagactccatgccttgcataggcctgcagaaacccagggttaccaactgtgctgagcaaactcattttacagactgggaccctggccttaagagaaaggcccatggcatttaataatgttgctgatacatcacttagaatcactgtgcagtgaggatgatgctaggggacaggtatcagggagacaaatgagcccacccagcattcacacatttacttggcttcacttttcaagcttcctcagaatacttcagcatcatatacgaactttggaatctgcctgtccctctctagtttcatcacttttcactcatgcctctacgtctattcttcagctgtacttggtttatgaaagtaccagcctctcccatctgtctgttgggctgcttgccccacctccggcccttggactcagagttccctgtgtttgattactcttctttccatcttcactttagctaattcttcctacaacttcagtactcagtttagaggtggccgaagcttccttgactcctgtgtgtcctgtggcacctgaatttgccctatcttaggttttaacatgatttattaaaattcctatttattttttcctaccagacccctgaaagcagagagggactctatcttgtttaggctttagtctctacaaataacatagtacctagtgtactgtaggtgaatgaataagtgaatgagctgtaaacccagatacagagtctcctcaaagtcataggtagatgctggacagttgttaaatgtctgtctttatcaaatcttagggattataatattttaaaactcaacagtgagagaaaacatggaaacttcttatcttttgaattgggtctctgtggtgcactgtaattcaacatttaatgatagtcttttgatgccatttatatttattacgatttttaaattgttcttgtacttttgatagcttacttcaggtccatttctgtgttggtttctctgacctctcgtttgtctggcaaaatgacttttttttgttgttgttgccagcatgactaataatgatttgctcaaatttctcccattcttacagatgatattaagaaactgaagttatttttgtcttacaggatcaaaccaatggtgaaatatagctcagggaaacattgttttggctttgggaaacaaataccatagataaatttgagtgtcatttccatctgtaattgcatgtgattgcagtctttcctgctgagggcttcttaagcgaggatgcctgaaaatagatacttttgcaaatagagttgctaattttaaataaaaatataaaatagtagtaatagtagtgatgagttaggaaaaaagaagcatatttgatggcgtcctcagatggtttgctttaaatattagttgaaaagctatattgaggtttctcatttgggttcatcagaatgtttctaaatttctccttgtgatatcttatataaatggaataaactgtcagaaccagtatttaagttggtgtcatcttgatatcaaagtatttaaatgaatgatgttaatagttttggaagttcattcagaaatggttttagcatatatatttctcgtttctgagaaggaaattctatcactactattcacctattataaaccattttagcttcataccatgtattttattcagtaatttaattttcaatgtaaatcattttggcttccaaaaaaaaaaaaaaacccattttgtttttgggcagtgctccaacttctacaattattgaagcgctgcagaatgtaaattcatttagttggactaataagttcataaaattgtgccatatttcatcataatctctttactaaagtggaaaatccctctggtttataaatttcagtggtttttaagtttttagtttgattttggttttaacgttcacagacgtaagtactgctgagaattttaattatgacatttttagtgcgaagagaccttaaagaaaattgaagtgttatttaaattctaggactagctaaatgatatcaatagttttggggagcacctccaggtggactctttctattttggatttctaatttaagttactcagtaatcaaagagtctcaaaattgttgatattttatagtgataaaggttcttggcactgtctcttaaaaagttaaattgtccagttgcaaatgatggtatgtcttccctagaatttgattttttcccccaaatttcacagtttggtgattgtcataattctcatttgatgaattgtaatctgttttgctaaattcagtattcattaaagttcatagttcagtgagatataaatgtaaagataagaatgtttgtggtacaaaggtaaaatattatcccagttcaagggacaaaattataaaagagaatcctttggcttctttcccttactagtggctaatgctttccaaaagtaggagcttgggaagaacaattgaagaattgatgatagccccttaagaactgggaatgtacttcaatcccattaatcttaagtgtttttgcatcgatgtgtttataactagagttaccctgtgtcccagttagcctgggaaagttttggtgtacacctgtgtcctggcgtaatttttaatatcacctcctttcacacactgtaaagtgtttggataatgattctatgtatgatgcacattctattgtgataccttatcagtgatgaccatgagtgtccagctagatacaatttcccaaagtatttgatttaagtgcataaaacattgaaatatgagcattattagtgattgtaaattctcaaatattttatttatggtatgctaaaccttcaaacaaaacttttctgacctttttttaagtgtaagagtatcagttgctaattgtatattttatttattatatattaatactattatgtattagtgttatgcatccaaagtgaattattctaaagttatcttttcacccatatgaaaagcatataggatttcactaaaaaatcaacttttctttttccattgaggctgaagatttgaaaatgaaagcacaaatgctgatttctagagctgacactgaagtaaacacagaacaattcctatagaaacataccagaagccattgttaggtgggggatcacttaccccgacaccttgaagcctgggtagaaatgacagtggagcagccaaaaatcagtttagctaagagtgcagtggtattcagccctgctttagggattcaggttttttcccacttcctcagaaatgggaaagatgagttataattctgccattcccaaggggacgtcagatgggtagtgggatccctccctggagctgcactggcctagctttagaaacacagaagagtcaattcagatcttgcatctgcccgctgctgctggcagtggccgtctgccaagggagaagatatatggaaaagaggaaaaaatgttggcaaggaagaaatatatcagtaaagatggaggaagaaaggtagctttagtcacaaagtctagttgctgataaatttttttgttttagaattattttggtatttcaagaagagaaaaatagacatggttctaaaacagctaagctgttgtcctaaccattgttgaagtagatccttgtttcacaacaacaacaaaacactcttctcctaacactaaaaaaaattctcctggtttaaaattaaattattgtttctatgattgtacaaccataaaacttactaaaaatcaatagactgtacacctatagtaggtgaactgtgtagatgtaaattatagcccaataaagcagttaaaagtgaaaaaaatacaatcacatttcagaatggttgtgttatattttaaactttaagaaaagtccaccgaacaattctgcttttaattcttatttttatgaaaagcttttaaaacttaatacgcagacttttacaaacacacaaaagaagataaaatagtataatgaaccctcaaatatccataacctcacttctacagttagcggcatatccccttttcctgcctcactggattattttaagacatgtcctactcaatgataaattcttccatatgtatctgtaagagataggaatcttaaatatatatatatatatatataattgccacttaaattttttaaatactattattaaaagaataatcctcaaaaatttccttagtatcatctcatgaagatctttttacagttgtttttataagtgtttacaatgcactttttacaaatcaagaaccaaggaagcaccacacattttaatgtcctaaatagtttctaatgaggaccctcctgtaaccaggagttgtcattttaaatgcgatttattgaccattccaaagctcttttgaatattttcatgacataataaaacagcaggtatagtttagtgcaaaacattgtgaaaatattttcatgtttagcagttgtttctagtttaagttttaaacgcatcacccaaaataatctgtacaccaaacccccatgacatgaatttacctgtatagcaaacctgcatatgtacccctgaacctgaaataaaagttaaaaaataagaaaatagagggagaaaacccaagttaatctctgttccgcaatccattcattctccctagtaacccatgtattggccttcagcagaattacctatattccccatccctccctccttttttttttttttttttagttggagtctcactgtgtcgcccaggttggagtacagtggcgcaatcttggctcactgcaacctctgcttcctgggttcaagcaattctcctgcctcagcctcccaagtagctaggactacaggcgcatgccaccatacctggctaattttttgtattttttagtacaaaaaatacaaatacggggtttcaccgtgttagccaggatggtctcaatctcctgacctcgtgatctgcccacctcagccttccaaagtgctgggattacaggcttgagccactgcccccagcctctccctcccctttttaaataaggttatataagtactggagacccattgaaatgttgggcaatcactctgtgattctgcctgatgcgcactgataaattttgatggcatttctcctcaaaataaaaaaattgtttaacttgtcaccttcctaacacctagcatagagaaactgaacatattgttacagtgtattcagtagacagaaagctttatgttaggatgcttagcatgacagaaaccaaacttgcacattgaaattacttttgggagattgcttgtggatgatggtcaccccatcattattcagtatatgggccacttatttcaatgatctttagatataggcatacctcagtttattatactttgtttattgtgccttgcagttattgcatttgttaatttcagattgaaggtttgtgacaaccctgcattgagcaagtgtagtagtgccattttcccaacagcatgtgctcacttcatgtctctgtgtcacattttagtgattctagcaatattttaaactttttcattattattattattatatctgttatagtgatcagtgatctttgatgttgctattgtaattgctttggggtgccacaaaccatgaccacgtaagacggtgagcataaattacaaatgttgtatgtgttctgactgcttcaccaaccagccattccctccatctctcttcctctcctcagacgttgctgttccctgagacacaacatattgaaattagcccaattgagttgagctctttgggaggctgaggtgggaggattgcttgagtccaggagtttgagaccagcctggacaacatggtgaaacctcatctctacaaaacatacaaaattatccaggcgtggtggcatgtacctgtggtcccagctactcaggaagctgaagtgtgaggatcatttaaaccaagggaagttgaggctgcagtgaactgtggttgtgtcactgcactccagtctgggcaacagagtgagaccctgcttcaaaaaaaaaaacctaaagaaattattcctattaataatccaacaatggcctctaagtgttcaagtgaaaagaagagttgcacatctgtcaaaagctagaaaggattaaacttagtgaggaagacatattgaaagctgagataggctgaaagataggcctcttgcaccagttggccaagttgtacatgagaaggaaaagttcttcagggaaattaaaagtgctattcagtgaacacacaaatgataagaaagaaaaccatgtggctggtttaatttgtatgttcacagattcgcacttttaaggctggtatcagtcttaatgctgatatggagaaagttttagtggtctggatagaagatcaaaccagccacaacattctcttaagccaaagctaatccaaagcaaggccctaactctgttcaattctgtgaaggctaaaagaggtcaggaagcagcggaagaaatgtttgaagcttgcagaggttggttcatgaaatttaagaaaagaatctgtctccaagtgcaaggcgaagcagcacttcacgttgatggaagtgctgatggagaagctgtagcaagttatccagaagattgagctaagataattgatgaaggtggctacactaaacaatagatgttcaatgtagatgaaatagctttctattggaagatagatgccacctatgactttgatagttagaagaagacagtgcctagattcaaagcttcaaaggacaggctgactctcttgtcaggggctaatgtagctggtgactttatgttaaagccaggattccaaaaatcttagggcccttacgaattgtgctaaatctactctgcctgtactctatacatgatgcaataaagctagatgacagcacatttgtgcacagcatggtatactgaatattttaagtccactgttaagacccactgctcagacaaaaagatatttttcaaaatattattgcatgctgacaacgcacctagtcaccaaagaactctaatgcagatgtacagggaaattaatgttgttttcatgcctgctaacacacatccattctgcagtccatggatccaggaggaattttgactttcatgtcttattatttaagaaatacattttataaggcaatcactgccgtgcatagtgattcctctgatggatctggcaaagtaaattgaaaagtttctgtaaagaattcaccattctataatatgatacaatccaaaacataaacgattcatgggaggtcaaaatatcaacattaacaggagtttggaagaagttaattccaactttccatccatcatggatgactttgaggggtcaaaacttcactggagaaagtaactgcagatgtggtagaaatagcaagagaactagaaatagaagtggaccgtgaagatgtgactgaattgctgcaatctcaggataaaaattgaattaatgaggaaatgctttttatggatgaggaaagaaagtggtttcttgaaatggaatcttctcctggagaagatgctttgaacattgttgaaatgacaacagaggatttagaatattacgtaaacttagttgacacagcagtggtagagattgagaggattgcctacagttttgaaggaagttctgtattacatgctacagagaaccctttcatgaaaggaaaagtaaatctttgcagcaaacttcattgttgtcttattttaagaaattgccacagttgccccaagccttcagcaaccaccactctgatcagtcagcagccatcaacatcgaggcaagactctacctgctaaaagattattactcactgaaggctgatgatcattagcagttttagaaataaggtatttttaattaaggtgtgtagattttttttgatgcagtactgctgcagagtttatagacttcagtaatagtgtaaacataatatgcactgggaaaccaaaaaaactatgtgcttgctttattgggatgtttgctttattgtggtgatctggaacagagctctcaatatctctaaggcatgtctgtttgttattggatcttcacaatgaatatattagaatttatcaatggttatagcaaaaaggccgaattgaaagttttggttcgttgtgaaatatcatcattagtttttaatctggacctagaatctaggtccttacatgcattagagaattttatccctctaagaaaatgatacttttagtcatcagtttagagcactgcacttttaacagaatactgtttgaaatgattaatctgtcatagagattggaatactcaccaaggggtgaaaattaccttgacaagtaggacctaagcatcctttagatggtactaagaataaaaagcagtcttctctgttaggccatgtgaccaccacacacatcttagaattcattttgagtttgtattacaagagcttgttttcagtaatcgatacttaaatttggagaatttgctgagcatctttcttgttctttagctgttgttaacctataatgtgatactaggaaatcacatggtctgttggatttagaactaagactttaaaacataaatacattctcctgttttgtgtgtgaaacttgaacttccgcttactcttatttcatcccactgcatggttataactgagcatgaaagcttaaatgaaacagaggaagaatttagagctaaggtaaaggcattggatgttaagtaggatattctattatttagggtgctttgcctataatttttcaaaaatcctatacaaattgacttcaataatacaaaatattactggctcacataattgcaatttcagagggaaggcagctatcaggattggctaatacaagagaagagcaatgtcaagatcttggttcttgccacgtgtggtggctcacgcctgtaatcccagcacttagggaggctgaggtgggcagacgacttgaggccaggagttcaagcccagcttggccaacatgctgaagccctgtctctactaaaaaatacaaaaaaattagccaggtgtgatggcacacacctgtaatcccagctgcttgggtggctaaggcatgagaatcccttgagcctgggaggcggaggttgcagtgagccaagatcacaccactgcactccagcctgggcaacagagcaagacgctgtctctaaaacaaaaaacaaacaaacaaaaagtgcgttctttttatctctctgttctcccctgtaagtgcctgttttactccaaagctaatttctagtactagagcttatgtggcttctcagttatgtactggaagagagagagaattgtcccaattaaagaaggacagctttcccacccccacagaaggtctcaggaaacctttgacctcagagttctatggtcacttgtgaacagttggtatcaccttagataacaaagcatttccctggagttgagattggagttagcaccctggacataagtaagctgtaggggaagggttggaaaggggacagacctagagttctttagggaagggggaaaggagatgagtgatacataggctacaataatgtccactacaatgtccctttaactttaagctgcttataaaaaacgtaaactatcttctgactatttaaattggtatctttggccagaggtgacatttggtgactttcatttgggtgtatttttgctttactttagcagatcttagaactgggagacctggctatcacaggagtatctgtggcctgtggtaacatgtatctatgggctgagaatgtcagtactctctaactgtatctcatctccttctgccaagaaacccagagcccacatatcatttgtttatttagaattaagatccagtaccctttccagttccaaaattggcatacacacaggactataaccttattttgatgcagaatattttgctgcttagttcagctaaaatccaggttctgatctcatgaccaggaaaaaatagacatgaggaaatattgaagggtgaggagggcagatttattaggtaaaaagaaagttctcagcgaagaaagagggggttctgccaacaggctcccacctcactgtttgaataccaggccatcacacacaagctgaagaggccaggcttctcccagtgcctaaggcgtgaatttcgggtggttccactttattgtccaagcttgcatgtgggcccccagttcattgcgggcatgcctgggtgagatcctgtgcaggttcccttatctgcctcctgcatctatcaatttgctttaatctcctttcagcaaaaggctgtggagatggtttcttggcctagaccttgtgtctttgctcagttgccttcttcatgggacctgggcaagaatctttctactactagtcatcagctctttcaccataattgttcatcccttctatgcctctcagctcttttataggcatcatacaggagtttgcctttctttcctgcggatagtttgcctttctttcctgccggcagtctggctgtggtggaaggatattttatgtttttctgaacacctttattatatggggttggatataatgtttcataaacagtagtctcctgctttgcatatccagccactttaaacaatagatactcaaatttcagtagttcttttgacttttaaatgttgtcttctgctttactatgttttcaaaatttggatgcatgaatcagttggacttcattaaaatttaaaactccacttaccaaaagataccattaagaaaatgcaaagggaagtcataggctgaagaaaatatttgcagcatgtatctgacagaggacctgtttccataatatgtaatggagatatttatatatatagcttaaaagaagaaagactacccaatgaaaagctggcaaaaaaatcattgcagctttgcttttttattgcaaaatattaggaacctaagtgcccaaacctaggataatgcttaaataaaccatagtacatccacacaatggagtactgtgcagctttataaaagaataagaaaggtttctctgagttgatatggacgatgtactgtcactggaaaaagcaaagtacttgggtgtgtgtgtgtgtgtataaataatgcaactattcatgtgagaaaaaagaaaatatataatacacgtatatctgcatatttgtgcaaagaaatacagggaagatcagccaggagctaatgggattgattgcaaattaggaatgaaccctgtaatgttggattgcaataggagattgcactatgatctcctggcttttaatatgcatacatacctatgtgtgtctctttatgtgaacatatctacatttccttgttctgtctactgagaaggcccagatacagtgacacccagtaacaagaagcatagctagcacccagatcttgacttcttaataccattcaccaccaaaaagagtcaggatctttaagcagtggctggatttaggactaggggcagagaaaatacaaatgatcttggagcagcaatatactggggctccagaaagtaaggaggtctcaaaaaaggatggaggtatttcaaaaggacacaagaactcatctgaagaaactcctggtgggtaaatctgggataccttgaacaacaaaataaataaatgagggtgaatagattataatccatagcatgcattaaatatccataatttcatacacaataaatctatcaatggtgaaaaagggacagcttacagtgcaatgccatcaataaatatagaagaaatgaggaaaatagaaaaacactacttggccatcaccatggtaataattgttacaaataagaatgataaatggatgctaaattagtaggtgaaaatataagaagcagaatatttgcctagtcttgaaatatccccccaaaagatacttattaagaacagaggaaaaaataacactatagtagggaaacctggcgggcaccttagccaagtaatcaaagttagtatcaccagtaatgagaaatgtcaatatcatgtaccacctggaattgtgcactgagaagggtagaacgtcactcttgttaaattcttgccaaaaatgcctaagttgaatttaagcaagaggtgatatcagacaattcaaactcaaaaacattctacggaatgacgggccagtatttttcaaaagtgtcaaggtcatgaaaacaaaaactgagagactgtcggttggagaccaaggatcctggattggaccctgaaccacgaaaaggacataggtggacaaccgatgaaatataagaaaagtggatttgttaagagtattgaattataattcagtgatcattatgctgtgattaagatatttatgtaagatttataatgttatataacatttggagaagctgagtgaaggttatacaggaactttatgtacttttcttaaacttttttgttagtctgaaattatttgaaaatcaaaaattaaaaatactacccaaagacttaaagacaggcttaaccaatgatgctggccaataagcacattttaaaaatgctcaacatcatttgtagtcagagaaatacaaatggcaaattaaaacctgaattaaatgctattttatacctccagaaatcaatgataaagatagaaaacaccaaatattggaaaggatgtgaattagctggaactcgcatgcttcactggtgggaagcataaaatggcacaaccacattagcaaatagcttgtcagtttcctataaagtcactgtatatataccctaggcctacctagtacatacctattgctatgacccaggaattccactcccaggtatttatccaggaacatgaatacacatgtccacacaaatatgtgcacatgaatgttcatagcatctttattcataatgtgggtaaactatgtatatgcatataatggaatactattcagcaatgaaaagaatgaactactgatgcatacaacccagatcttaaaaactttcagggaaaaaagacacaaagaagtgcttactgtatggttcatttacatcaagttcaagaaaaggcaaaaaccaaactatgtgactgaaattagaatagtagtttcctagtggtgggcggggattggctggagagagcacagggtagctttcttggctcagggaaacatttatccagacttactatattgtacgatacattttacctcagttaaacaaaaggcccagagtggagcataatgtctggttttgattaagatcttactgaaattttgaggtgttaacattcatgtgtacaaagctttcagcaactttttttgtgataggtgccttaaggaaattgtactgtgttattattttctgattacacatatcttaggaaagcataaaggcttatattttatttaaatgttattaatatattatgcattacagatatctgaaaatgtctactcttagttaagtaaacttctgtgtaaagataggacatttatgagtaagtccttgttgaaagaggaaaaatgacccagtgagtgatacagtcgagtgccagatgtttgagtaagagtgtgaaaacattaggattataatctccaagatgaatctgctgttaagtaccttgccttgatttcatttccttaggaatgtggtttttgttaataaaaaatgtttttcttgtgtttttatagtgacatttttctgcaacttagtaactccattactagtacagaagagatattgagatttttcttttcaaaaaagctctaattatttcaaaattattcaaattttaatatccataaattatctgtaattcattaggagatgatgggaataaatattttctaaatgaatatttgtgtcagtttcaggaaagaaaaaattaaactcctacagaattcataacattgttatgtataaacttgaaaacaaagttctaaagatgagggaatttatgtttttatatgtgtcttttgaggcatgattttatgttgtttcataatgaattatattagcaaacattaactcatattttctgataggtaggaggtagataaacttttctaaaaactcatacaattttataaaccactctttcacctgtcattcagcagaaagcgccgtcaaattcccaaacctcaatatgtttcctatagtccagccagaaccatacagatttggtaacaggattctctagcttcttgagtaagctagggttgagagtcagagagactgcattctagttaagccaggaggcctacaggagaaagagaggaataataaatggttcatctgcagtattttcatgtcttctagtttgtccagggaagatttaaagttccagttcttacatggcatcctcgctgaagttataattccttaatgcttacttcctaataataagctgctctttgttcatcagttttgccttgctgcagcagaaagaggaaataacttgaataaaatggaaataagattttgaaatcccaactccaggagttttttctggatgtagctttcctgaaataagaaggaaaataaacatttgttaatttccttcatccagtcaggccttatcagatgtaatgtttcttctactccttataacaatcctgtaagttagatattgttatcagtattaccatttaaaaaatgaagacattcaagttgttgctttcagaagcttcacagttttctaagacatggcagagctgggattctaacccgtattgttccacttcaaagcccaaacattttcccacacaccacactatttcttgaaggttagagtctgctgaaattcataaacagtgaacaaatgtaaaatgatctccagctatggaatactaatactggctttgccatagacttgagagagcttcgtttttctgtgtccccacaatgtaatgctgcctcactcgttctaactggagagaaacattctgcacacttatgtgacaaacatttatttagtgcttgctttgagctttactgtgtgtagcgctgaggaaatgaaatagacaaaatcattgtgctttgaatgtcatatcatgaaatagtgtaacacattctattttgactaatgtgtgtatgtatatagatattcttttataaaatctttaaaattcaatttttctcttagtcataaaattcttgactctctagctcatttatttactgcaagataacctgcttcttcctgagattagggatttgcatgttgtctatgctagtttggtctttttcctctgtttttttttttctttttctttgcacattctttctctgatccctattcttcccacctaacttgagattcttgactctctggtcttttccctttttcacttaatccctttagtacattgagtcaacatatgtttgtgaatgtctcccaaatcaacatcgtcaacaccttgttctctctagcttcagtttttaggttctatatgttcatttgcctataggatcttcccatgcctatattttacaggtacctaaaacataacaagatgaaaatttaacttctaagccttcctgcaaacttggcagttcttcccaactttcacatcactgttaatgataacatcacgattatttcaggcactaacatttataaccttaaagtaatttgtgattcatctctcacctttgttctttatgaaaaatcagcctctgagtcttattaatgcttcattcaaaatatctctgctctacctctttctttcttccaattcaggttgtttcttctctttcacttgacagactcttctgtatccctaaactaaccatactactactcagttggtattttaccaatacttctttctttatgtcttcctttaataaaagcttatcatagctcagtaacaccctgactttgctcttaagtcagcttccaccttaatcaactaccagatatttattgacagtctgccaggcaccgtgggaaagacacagatttgtataatacacagtctgtgtgctcagccagtttatggtctagttggagaattaaaaaatctgtatgaaaacaacactaacaatacatggtagtgcttagggagggtcaaacgagtggttccttatgtgtcttaattaagctgagtcttggctgtaagcggagaagtagggatgcatttgaggctggggagaaagaatgcattgagatttgaaggggacgtgaggaatattcggagcttgctgcatagctctgtattgctgaaggggagtgtcagtgtagggccgagtaggtggtaaggttggaaagtggagctggaaccggagtcctttttattcatctattcaatttgtgtcgcttttaaaatattatttctaagaattatagtttacattgtttccatttgctccattgcccatattatctttaccacatttttgttttgttttggttttttaccactaatatcttgctgtttctcctctccctctttctcatatatgcatttatgtatataggtcttactatatctaatctacttcatgcggctcccaagagcatgatgttatctgaaatggctgtgtaatcctgtagtatctaaaaagctggtaggcacacagtacatgatcaataaacacttgtttaattgaatttcagtaaaataaatagcaaacttttaccttctctgctccttctctgaaatgtaaacatttcaaatggcaaggtgtaaacttacctgaattaaatgaggtgtctctatccaacagaatatataacccgcattttaaattgtattgcttttattatgttttgttaatttcctaaatgattttccagcaattcagttgttaataataaatcagtgtatacattactaggtgtattgcttctctttcaattatcatcttttgaaaatttcaggaattatattgccatttttaccagagagcagagttgttgttgaagaaagtacaaatttttcatcttctttttcagtagctttggataaccaaggtgaatttttttcaggcaatcattattggctaatgcgggctttgaactcatttattaaatcaataggcttttgagtacttagcacagggccccctcctaagtaagaagtctgttggggattttaatttttcatgctgtcttcattccgcataattgcaaataatagaaaatgtgtcattttggatgatattttatgattcttcataagatatatttgaattccaatgaggcttcatttaatttcaaggcaatacaatgttggtgttccatagattaaataaatgaaaatccaatttagtatcagtgaatttgctttggtgtcaataacagtcatagtaataattaacacttaattattgcttattatgtaccagatatggtacaagatctttacatattatattaactattttactatatacacacatacatacacagacatgtatgcacaaatttataagttaggttactataattattacatattagagattgagattgtagcactttttctttttttttttttttttttaagacagagtcttgctctgtcacccaggctggagtgcaatggtgagatcttggctcactgcaacctccacctcttaggttcaaccaattctcctgcttcagcctcccaagtagctgagattacaggcacctgccaccacgcccagctaattttttgtatttctagtagagatgggctttcaccatgttggccaggctggtctcaaattcctggcctcaagtgatccacctgcctcggcctcccaaagtactgggattacaggcgtgagccaccgcacctggcctgtagcacttattctaaactgacttcccagtagaataaagatatgttttacctttaagtcttatagttagtagaggttttattcatttctagtcttgataaatagaaaagaagataaacgtacatcaattttttgaagaggtttattcaatctagtgcttcgttttttaccaccagttttcatttgtaatatttcatgacattattatgataattaaagagtccttttctctctgacagtgaagtacagtgaatgagaaagaattgttctatgagttgtacgtccactttatgtgactttataaagctactactctggaaatcctgagatttaacagatatattcataaataaattattgataggttcacatagtaataaaggcttacagtttaccttttaaacgcttcagccactgtattctgacaaaaatgtcccaggagatagatgagcaagctgacactgagggagatataaggaaacataatcgcagaggcggtctgtttgagccccatataatgtacagagtttaacagattttcaacaataatctcatcagaaatttggtctcacccccagatattcttggtacatgtttcagttgctagcttcttcattttactcctcttagcatgtgatggcaagggcctcaaagccttcagaaatgttggttgagtctgaattaaggaagcagatgttaaaaaccttgtgtgttgcacctctccttggattctacaatgaagctttcatttgatttttagagattggttgattgactttggcatatggaaatgttttctctttttttcttttttagagatagggtctcactctgtcacccaggctggagtgcagtggcacaatcatggcttactgcagccttgacctcctgggctcaagccatcctcccccctcagtttcccaagtgcctgagactacagatgcacatcacctggctaatttttaattgtagagacagcgtctcgctatgttgcccaggcatgtctcaaactcctgtgctcaggtgatcctcccaccttggcgtctcaaagcgctgggattacaggcacgagccaccatgcctggccaggaaatgttttctgatggtttctataatcagaagtcagtccactatttccttaacttatggtttctctccctctgttgttcttaagccttttagttacaggatttcttcatgcttttaaaaattattgaagatctggctggatgcagtggctcacacctgtaatcccagtactttggaaggctgaggtggcaggatcacttgaggccaggagttcaagaccagactgggcaacatagtgagaccccgtctctacaaaaaaattaaaacattatctgggtttggtggtgcgtgcctgtggtctcagttacttgggaggctgaggtgggaggatcacgtgaacccagtagtttgagactgcagtgagcaatgattgcaccactgcactccagcctgggggacacagtgagacccggtcttaaaagaaaaaaaaaattagctgggtgtagtggtgtatacctgtggtcctaactacttaggaggctgaggtgtgagagctgcttgagcctgggaagttgaggctgcagtgagctatgtttgcagcactgcactccagtttgggtgacagagtgagactctgtctcaaacaaagaaaaaattattgaaaatcccaaagagcttttatttatgtaagttatagctattgacattttttgtgctagaaattaaaagacattttaaaaatgtatgttaattcctttaaaaataacaataaaactcatcgcatattaacgtatattttctgaaataaaatttttaaaataatgagaaaatgccgttgttttatatctttgcaaacctttccaacatctggttaatagaagacatctggattcttctgttgttttgaagtatatgaagaaaattggcctcacacagacatgtagctgcaaaagagaggagtattttaagagccttttcagataattgtgaacacttcttgtagccactagaaaactctattgtatactcataaaagcatgagaatgaaaagggcaattaatgtctaagtataattatgaaaatacttttgacttcttgaacccccataacagtccctgagaccctgggccacaatttgagaacccttgttctagctcacaaatgaaagatcatttaattttagagttccaggcaaagttaaagacattaattaggaacttgtattcaaaatatataaattacccctagaactccataataagatgacaactcttttagataaaagatttgagtagacgtgcataatctacatgtcacaaaggagatacataaatggctaataatcacatgaaaagatattcaatgtctttagtcattaaggaattacaaaataaaaccataatgagatgtaatttcacatacactaagaggctacaataacaatactttttaaacaacagtactaagttttggtgaggttatggaaaaacacgtcatatattgctggtggaaatgtaaaatggtgtagccagcatggaaaatgatttggcagtttcttaaaatattaaacatacacttaacctaagatccagcaattccacttctacatatctacccaagaaaaatgaaaatgtatgcccatacaaagatttatattcaatacaagaaaaacttgggaacaatcagatgccaattggtaaatgtaaaaacaacatggtatatccacataatggaatactgttcagcacgcactgcaacatgagtgaacctcaagcattgtgctaagtgaaaaacaccaaaaacaaaatactccatattatatgatttcaattatatgaagtgtccagaaagaccaacctaaagagacagaaactagattagtagttgactggggagtgggaacaggaattaactgcagatgggcagaagagacctttttagggcaatggcagtactaaaaaactggattgtgacaatggttatgaagctctgtaaattgactaattgggcacttaaaatggggaaaaataacttctatgtttaaaaaaaaatgtgtacttgaaaaataagatggaggaagtacaccaaaatgttaaccaaaccaaaacaataaaaccactaggtgaatatgggattcttgttgccagtaagataatatgtgtttatgttctatagccttttggctatagagacagtagcatttcctatgattttgcagactccttcatcatttatatgatagactattcaactataatatgttggtttttaaggcttctgtttgaactatgttttcaactttttcctgatattgccaaaggtgttcttgtcactaagatcttatttctatttgttctcattaatgcaacagctatcaactgtagctatgatatttacctttgttttcgtacttagacttatagcaaattcacagccttaacacactgcagacactggactcctagtgtcttaagaggttgaaatcaaatgttggtaactttttcttttatactactctgctgaagttaccttttagaaaattaaaacaagacaacaaaactatttatctgatggagtaaacctcccagcgattatagacatgtagttacagtagatttgccttggttttaaaaggttttcattgtccttatgttcaaagataccactgttgaaagttctcactagtggctacaagggttcattacgaaggctgcagtccattacacatgggttctgcctgctgtttagagttcttctccttgtcttctcagtttatagctctaggctttttgagtacttgatttacagcaaatactcaagcccagtcagagggtggaaaactttagactattctttttcgcagaattcactattctggatccacatttggtgttagaaaaatgtaaatggataagaggagagaaacatcaactggggtcaaaagacagcaggggcaaaccagcataggtcagcaaaaagaaaagatggaaagaggaaggacctccattggtaggatgagactacaatagcagagtggatctgttttgggaagacttaattaaataggacagtcatgtcattccagtgagttccaaagactccattgcacaagtagcctcttagggaagttcaggaaggtatgactggccctgtcccaaggctgaaaatctctgaggtgtaagtaccaggtggggatctgtgggaaatgagagatttttcctgtgcatgtcctaagagttttctgtattcgtattctgaaatggaagcatagttctctggacagattgccttcctgtgtggtttccactaggttaggtctggcaagggaggtcaacagaagcttcatatggtgagttttctcccagccagagacttaaatactttccagagctgtagcggggaactctgaccacggggaacccattgcagtcatgcaaataagtgctttgccacaagtcaggttggtttatctatgcttattctgttaaaacatactatataaagttcttaagtgtcatttgtattgtctttactagctgtcttgccactttttgctcttgatataatttaactttcagtttcagttcacgtttggcttatccccagctctgtggtggtggctttcagcaaatgtggctttggtaaaaaagactttggccaccatctaagacttagctgcttgtgggtctgatctgtaatttgatacctttggagaccgtacctctggttgtgatcatgagctaggtaacatgttcagatagcagggtgatttgacattcaagataaataagttgtttatcagtaggaccatgtctgatactacttagtcaacaaagcaaagatctgggcatatagtaggtcccaactgttctccagaaacatttgtgggaaatgtcttttttaagtataaagatgcctgggtaccatgtctgatttaataaattgaaaggatttaataaattgaaagtattttgaaaagtttccagtaaggttctgatacccagccaaggctaagaactgctatatgcacatgtggccctcagagtgtagcaagggtgccagagcctgtctgcttgggctcaaatcttggctctttcatttactctcggcaaacacttaggcaagttacttcactgctcccagcctcagtgttctcatacgtaaaatggagatgctaagactgtttcatgggattgttatcttagttaaatgatccaataaagtgcttaagcacacttttgacttcggcagttgaccaggaaatgctatttcttctttggtcattatcctagatcagggaccagatctggccccctgactatttttgtactgggaactaaatggttgggggggtggtggggagtcaaaaatattttgtgatatgttaaaatacatgaaatccacatttcagtgttaataaataaagttttattggaacagagccatactcattcatttatatatcatctatggttgctttcccattataatgacatagttgagtagttgtgacagaaactatgtctcacactttgggaggccaaggcggttgaatcacaaggtcaggagatcacgaccatcctggctaatgcagtgaaatcccatctctactaaaaacacacacacacaaaaaaaatagctaggcgtggtggtgggcgcctatagtcccagctactcaggaggctgaggcaggggaattggttgaacccaggaggcagggcttgcagtgagctgagatcgagccactgcactatggcctgggcgacagaacaagactccatctcaaaaaaaaaaaaaaaaactatgcctcaaaaagcctaaaatatttactatttaacccctttggagatctcctagatctttgcagtgttcagagcctaacaggttaattgtcacctttctcaaatggacaaaagaatgaggaagacttttcacttgatgttctcatgtttttggtgccagtgttactttccagggtatgttgaagggcacataaattcaatagctattttaacctcagtgttacaaatgcatatccttggtcacgtgtggcattgctgtgatgcagtttaatgaattacctccaccttctccatactgtttatccacagctctccatactgtttatcctcagcatttgcttcctcataaggaaagcccggatcagcttctgttagcttgcccagcagtcaccaccagcatgcagcagcagttcatggataaacgcctcaagggcatttaataacattgcagtttagtgaactagaatagttttccagagaactgagtgtcaattttaatgtttttttcctgatactttatgaaacaccagaggcatctagctgtgaatcccaaggacataagggtaacaccattcagggacatgcctgtattctggatgccttgttttcccttttcataccccgaacagactttgtgttatttatccgaatgccagcttccaggatttgtttttcatgcttaggcataaagataagaatccaaacacggagggaaatagaaggctagaatcctgcccagtagggcttcggtggagaatgtactccttacccaggcccccatccccttgttgaaggctgcacgcagccccaggctgcatgcctgggtgctcttgtcctttcaaggctcttaatctgatttctccagattgaaatcaagccagccaagatgttttgtttggcctgcataatttttttaacgtttttaattatttgccaatatttaaaaatggggagatttcatataaactctcgacgtccagcctctcctgaagtagtgaaaggtctggcaacacggagcctgcattccagcatgccagccattggcaagccctgagcagcagctgtagcagctgctctttccttgagccagggcgtgcaggctcctgctgcctcactcatttcatcatctcatggctcagctctgtggcaagatgctggatcccacatttcctagatgcggctcaggtagcttctcaggagcagtcttctcttccctgttttcttagttataggtaattttcagttgtccatctgaatggctaaatggtcatggagccaaatgcattcatggggacctagatcatgatttggaaaatttttatttttgtttttaggttgaaaagacaacccaaattgtggaaagtgggtatataacatagttgttgtattactctgttttcctttttaaaaaaaaaaactcttcaaaaacaccaataaaaactgcctagacaatatggtatgtagactgacaaacaggagatctttcttagcttaaggcccaactttagaatcaatattaatagctaagttatttagcaacctattctgctaagcactgcccttggcatctgaaaatgtttcttctgcacttctcaataatctagctaggtagactatacttttacaattgcacagaagtggaaatagacccctaagaagtaaagtaacttgcaccaagtcatagctagtgagcagatgaatttgatttcaaccccaggtcttctgatttaaagtctgacatctctccattacctctgtgacctggggtaagtcctagttagaatgaaaacccctgtattttcttccataagaagtgaaactttcttttcaataattcaagttagtatttaatattcaagcttcaaggagaaccatttgcaccatttttccctgccttttggagctcaagaaaaaggggactatgtaagttgtaaagtattccatagacagctacagtgactgtagtttcgtggcgtattcattttatggctttactggatgaaacagaatcagattacaaagctgtcatttgcaaaagttctgagaacgttgcatgccccattgaagaagattttattttaactttaatcagaattcaatttaaataatttagagtgtttttaggcagaatggctgtctgaaatgtaatgtcttcttaaactattagattgtattgacttaaaggttgagtacatgtgaaagaccatagcctttggaacagccgcagaataatactcagctttaatttcatatgggataaacgtattcaattcagaatactataaatatgtaagcagaaaactgaattgtgagtaagttattaggtaacactaaacatacataaaaattccatcattattgggggtcagtttctcaccttttgtttgacattccttagactttaacaccatgtctaatgatttctacttttccttgggtttgctggtatgattgtctttactaagatttttattatactgattttaaaatgaatttccatgactttgttgaattttattgtacagctatttaatcagtctatcctgagtcatatgtagaaggcactgtgtgtgctgtggcactgtgttgaggcagctgtgactcctcctagagaagtgtggtcttgtctaaaaaaaaaaaaacccatcattgtccttcctctccttctcaactttggagaaattgcatttctcctttaaggttcagatgaaagatgacctcttcacaaaacttttgtgatcactatcttctgtcctcctctccttccctcattaatttcttcttcctctgtgatctcttaacagtttttataccttaaaatgcacttaacacattttatcataggtaattgtatgtagttctgtgaacttcttgcaagcaaatatttttattacgaaccttcatctgcacaataaacacgatgcctatcacatagtaggtccttataaagaggcagaggctaaaaccacacaataaaactacttttgttttatcacaaatggatcatgcgattaaattttgattaaatgagaatctatttttctgcccgttgcagaccagtaaaaatatttgaaatgtacttttcatttaaattttcattttattcaaaggaacatctcatttacttttagatattttcttggctccctatatgtgtttgccttgttatatggtgatacaatggctaatgacccctctgggacaaggttttaaacagtaacttctactactctgctaggcaaggcattgacaggtttgggagtaaattccagggtcacagcacaagattagtcctcagctgagaagggacagttgatcctgccccaggcactagcctgttgctaaacaagaggactacactgctgagggtagctcagtcctaacttcagacactaagggtgtaactacttgagccatgtaggttccatgaggctctattgatgcataagatatccccaccttggagaggctgtgatatagataagaagaaatgacatgcaaatatcaaccttcacatagagaagaaagcaatcattgctactaagaacttgccaaagcaataagaacaatgtgaaatgggaatacttttaatagcggatggtgttcttgcaaagcttaattaagataatgcagtgctgcggggcccaacttgtgatagtgctcagccagtgttagctggctccttgaggtttcaatcaagtgtgcaggtattttagagagaggagatatttctgaccagggttagggaaggttccaaggaaggttgaggttcagtgagggccttagacttggtagtgaggatgtgaaattttcgactctagtctccagaagggaaagaagaatgagctgatgataattgacaaagcctccattatgtaaccatttttacaaattccattaattgatggctgattattattattacgaataataaaactaagtccaccagaaaatgattggatcagtccagctatatacacattgctggtatctgatgaatgccatccaccttgttttgacagatggaatgcagaggctgggaaaactaggctatttttggcctgcaagctgtattttgtttatctccatcctgcttcatagaggcacattatttcacgtaacttgatctgaggtgttaaccaaactccctctttctttaatattcttccagtgacgccatggtttatcaaatttaataagctcctctaatttttctttgacttaaaatattacttgtaggctttttcctaatatattttttcagttttataattgcaacataaaaataaatacataagtagcctccttaaaaacatctagaactgcagtgagcagagaaaaagggcaatgagccttccatgtctgcattttattatcttacacctaatgaaaaattctaaagctttttaaagattctcgtgtgatcacagtttggctttcagcactgttggagctgtttaaaatttgtgttttaataggtatctatacacatgcatacacaatcttatatttttcgggttttatttatctcctggagtacttgccttagaagtattcttttgtaagtaatttcccttatctttgactgccattctcatcaaagaccattgtgactgctttggaattcttttaactagtttgcaacttaagactcttatgtgggataaggacagtgattactccctttcctgtcttcagcagtttgctctgagttgggcttcataggtgtgtaccctggccacaggcaaggccatctctggatttactaccaattcattctaatgatcactttatatcttttcgtcaaccattcctcttttcaggaccatagaagcaaagagatatacacacagggcaatagagattaatctcatatctacattgtacagatgagggaagaaacttagaaaggctttaatttcacaggatgacccagcaagttagtgatttacagattgtggtggttttgtatatgaaaatatttaacatattagtgtaataatttattggtacttgtggatagaaaaggcttttgaaacttattatgattgctttgcacttattatgtctcagaatttattggcaaaccagcaatataggacaggttcctcagacagaaactcaggatgggagcaaaggcccaactctgcctcaaaccacaggtttttttcccctttgggaatatgcataaaagaacactgacaagtaggaaaggaaattaccttgtcttaattcactgggcttgggtctggagcccactggagagaacattaggaacccagaattagtggctgggtgcaatggctcctgcctgtaatcccagcactttgggagcccgaggcaggcagattgcctgagctctggagttcgagaccagcccaggtgacacagtgaaatctcatctctgctaaaacacaaaaaattagcccagcgtggtggcatgcgcctgtgttcccagctacttgggaggctgaggcaggagaaatgcttgaacccgggaggtggaggttacagtgaaccaagactgcgccactgcactccagcctgggtgacagagcaagactccatctcttaaaaaaacaaaaacaaaaacaaaaaaacacctaaaattagtgaagtatcacaccaaaaccggcctctttctgcccacctttattctcattagcaaaaagagactgtcctctagaatgtgacccatccagaccctcctcccaggagaggagggaatggaagggaaggaccttgctgacatataacttggagcccaagggaaagttgcacctgagaaaccctggacagcaagagaacattgctctgtagcaagggcaggctgcaagttgggagaaacgcagcaatggtgccctaagcaaattgatcaggccagtatcatggattgggggagtgggaaaaggctggaacattctaggaacttctagcattaggattaaaccaagacttaaggctggatgggatctggagatggcagacctggaagggcagaggaaggcgcaggcaagtaagggtgagaagcaaccgtcctagccctaattggcttctcctggtaagctaaaaatcagctggtggttttgttatataggactctaaaatcaatgagtctttctcttttacgagtgactgaaatgatagttaggcaatcagttataaatctatatgctttcttaggccaggccgagtgtctcatgcctgtaatcccaacacttcagaaggccatagcaggagaatcacttgaggccaggagtttgagagcagcctgtgcacgatagtcagaccctgtctctacctcccacccaccccgcaaaaaacatcagaaaattagctgggagtgctgttgtgtacctgcagttctagctactcaagaggctgaggcagcagcattgcttgagcccagaaggttgaggctacagtaagctgtgatagcccacccgtgattgcaccactgcattccagcctgggcaacagaatgagaccctgttgcataaagcatttttggctttttcttttttttttttttttttgagactgagtctcactctgttgcccaggctggagtgcagtcgcactatttcggctcactgcaacctctgcctcctgggttcacgccattctcctgcctcagcctccagagtagctgggattgcaggtgcatgccaccacacccagctaatttttgtagttttagtagaggttgggtttcaccatgttggccaggctggtcttgaactcctaactttaaggtgatctgcccacttcggcctcccacagtgctgggattacaggcatgagccaccgcgcccggccattttttgcatattcttcatgaaaagctgttgctttttgagagagagaaaaaaacaccatgtaattccaaataaactaaattattatttttctctattgtattattttattattattttccttctatatacaagaaatggtgacaggaaatatttctttggaaattaaggtaataatgggacaaactggaaaggcctaggatatgaatcagaccaaggtgggataatatctggagtatgggtacaggtgtcacaaggaagtccagcccagaaggcagagtgcagaaactgctggtggtctgagtaggacatcatgagagtctttgggtgtaggaggagactgcatttagaaatctcagcaggtaggctctcaagaaaggcaggtgtcagagccccagtcttgggactgggctttcgagggagtcagggagttaggaattttgtcctgtaaggacgggggtactacataggcattaacacaaggaatgggacacaggggaatgaggcacaaaacctattaacagaaattgagcccaacatgcaagcataattggtagaaaagtaacttaacacagagatcccagctttggaatagaaggactggatccttctgcccaaagttgggattgacctgaacagggctgaatacagtcctgcaaggaggtaccattacagtgaccattctacggatggacgtactagagcttggtgtggctaactgtagctctcacagtcagtgagtggtgaaaccagacaggaaccaagccatctgctcccggaacagtgctctgccattgcactaaggtgcttcctgatctcaagggctgtgaccttggggaagagtagaaagtttgttgagcgccagttgtgttccacacatggttctaggcattttaagtgtacagtagttccccgtttgtcagtggtttcatgctccttggtttcaggtccccacagtgtcaaccataatctgaaaataggtaagtgtagtataataagatattatgagaagagagagagatcacatccaaatagcttttattacagtctattatttaattactgtgttattattagttattaatctcctagtgtgcctaatttatcattaaatgttatgggtgtgtgtgtgtataggaaaacacagtatatatagattttggtactatctgtggtttcaggcatccactgggggtctttggaacatgtccctcatggataaagggagactactgtactgttggcttaatctttataagcccctgtgagataatttttgttactgactttatggatgaaaaaatgtaaggttaaatggcttgttcagtgttccatagctgctaagtgacacagtctgctataacccactgcatctgaccctaaagcccattactgccttatgaatcgcattaggaacctctcttgtcctgagtttcagctgtaaataagaactaagctattttttagatagaaagagattttaaacaaatttagccaaatgatcaaatatacaaggttaaaacatatgtttaaagccttcttagaaattgtgaactagatgtttttcatgcatgcgaagattcagtactgcttctgtttgactggccaggtgattctagtgagcatgggcttttgtcagacttgagtttgaatcctgccatcactgctggccctgtgaagcaccatggacagctacccatttccttgctcaggacatgaggatagtatcacctatttaaaaggttatcataaggacaggagtagtggctcacacctataatcccagcactttgggaggatcacttgagttcaggagttggagaccagcctgggcaacacagcaagatcacgtctctactaaaaatcaaaaaaaattgccaggcatgggcgcatgcacctgtagtcccagctactcaggaagcttatgtgggaggagtgctggaggctggaagatcaaggctgcagtgagctgtgatcatgccactgtactccagcctagatgacagagaaagaccctatctcaaaaaaaaaaagattatcataaacattaaacataagaatgtaacttgcctaacccagtaacctggaacatagttggtagcccacaagcctgagtcttcttccctttcagctcatgctgtcatatttccatggctgctccagcacacttatgatctagtcccttctccaaccctgcccttctcagtctcagcagatagtcctatttcagagaacaaaggcttgcagctcaatatcccacacagttcctctcccttccactctcttatcagattctaatcttcaactccacatgataaaataaccatatacaaagttctaacgtatgcagattttaccccttatatcactttttcatcataagcataagaattttggttcaaacagactgaaatttgttatttctactgggaataatgggataaaggggaaactggcaggtttagaatatgaaagcagaaaatatctactcggctttgacaagctaagtaggtaacttgatggctgccatttttatctcaaacatacatattatttgcttctttgagacaatgatggggccaagaaggtagaaaacaactttgagttataaaattagaaaagtgtgagtgtttgcatagagggccacaaagaaatgatttaggatggcgttggcttttctcatttggatgagtgggtgtgaaggcaattcagctatggaaaaacaagtttggagccagagagtaacagagacaaggatgattaattggaattatatctcccaatcaaagtcttcccaaagactctttctttggaaagagtcatctggattctgagcttcactggtccctttgccattactctaggacatcttccactgaactactagagtgaactcccaaaacacaaattagacctggactggcttcaccattgcctaagattcatgtccagactgtgtcatatggtctaacaagtcctcacggttttgctctttctcaattctacacatacaccccactgtgcaccagccacaaaactcacccatcccaaaatatatgatgccttctgacaacattttttttttagtgtgtttctctgggtaggaagactttctaattccctttccatccagaaaacagtcctcaagatgcaaatctattgttatttcttctgtgaagccttttctgatttctgaggcgaaaatagttactttctcttctgtattctcttagcacttattcatgtgccgttcttgccccagggcttaatttgcttaggagccactctcccacactggattatgagtccctaaaggacagggatctcttattcatctctcttcccagtgctgtaactggcatgtaatagccacccgataattatttgttgaattaataaaagagcaagcagacatattgaattaataatgcctaacttaacaaacagaacatatttactgtggttaaaaacatgtatcctagaaaaacctctggaaggatacagagaaattgataacagtggtttgccttgggggaaggaaactaggtggttagaggataggagagggggagagagagagccttttcaccagatgtcctatagtacatcttgaattttgaaccacatgcatatattatagcattatagacccaaaactagtctaatttaatatttgtgcatgtggcaaaacaaacacatatcaaataatttcatacttttcttgcaaacattttagattgttggtagaagtttatgattcagttgtcctttgttaccaatatctgctctcatctgggtttcatttcggtctagagttatattgttgttcagaaactgggctatgcctgagatggcaaataaggacccactgaactgtgttgaaaccttcaaatcttaacaaatagtttgaagccagagtggctgaacaacagtcccttctctctatcctggcctcatttctacttttgaggtcttgagggattagctggttgggcaaaaatctgatcactgagaacccagcatgtaggatttttaaattcttgcaagggctgtgcatatgttggcttccaggtctggagtttagaggtatatttagatcaggcaaaaagtggtggatcaggcagtatgtaaatttggcatcctacgtatgatgtaattagaattataggtgcgaccaaattcatatggttctcttttcccagtgtcagagtggttagtgatgtatttgtctgaattatcctttttaaggtggcctaaacatgtcttgcattccagaggttctgtttctgcaccattttgtcctgttggtataagaatattaagtatacttctaacatggatggaccgtagacagagtaagtgctgtaatgaaagtgctgtaagtatgaatcccagctaagctagccacataattttaccactccgaatttgtcttaattgacaaaatggggataatatgaccaatctcataggactccccccataggatttttaaaggtttaaattaggtatgattggtaaagcacctgtcacataataggaattcaacaaatgctagttccctttccactgccctgaataacgtattagtttatctagataacagatgtttttgcatagtgaagtgcagctatgttaaattcctagtattgaatgtgtgagaaatgtaagtcactcctcctgaaaaaaaagttccttgttccttgttagtaacttacttgctttttcttactgcgcaccataataagtgtttctcaaggttaaaatcttacatcacttggattttgtcatataatattatctttgattatcttttactaaaatatacataaaaattcttatgataattaaaagtacattttaaaaaatgaaaaacgaacacctttcacaacaagaagaatgtttatgtgggaattttgtgcttatccacatgggaagaactcttgaaacaccacaggaaaaaaaaataatgctaatctgacttctaaattaaaatgttagaatcctaaaaacataatttcaaaagatttgtgcttcaaggtggcaaaggcaacctgtacttacttctcaagtcagttctttttccccctggcattttaaaacatgttaatccaggcccactcataaacctcagcagcaggggatcattgttcattggtttattatgggcagaccaaactggttttaactgagcagaggaagttaattatcgaatgttttagttggctccaacaatgaataaccagttcttgttggacaccgtcttaactcaccatgcgacattataagaacgggggcggggcggggggagggatgggggaagggaaatcgcccatcagaatctgcaatgcgggaatttgctggggctgctctaatctgtttcccaggttgttcgaaccagttcaagagcagttaaacaaggttatgtaagtgacatgtgatgtagcccaaaatagtgactgcaaacacaggctgctgttgctgggcagttgtcaactgcttaaaaaaaaaaaaaaatcttgcagcaggacaacaaatggatctttaaaaatgaaaaagagatttaagcacaaagttaattttaaaaaggatttggagaaattgcctttttgatactgaaaataaatgattttttttttttaaatagggaaacttacattgtacataaggtctggttattctagagtatcgaccggggtagttagtgaagacgtacttgcagccagtttggtgctctacgaaacatatagttcccatgtttgaatgaacagcaacaacaaccaaaccctcagatttattaatggctctggcatataacaaattattaagcaatagatcattcagagagtgataaatatcaaacgatttttataagttattgtcccttttatttaaatactttgtatcttcaagatatgaaaaagaaaacatttcacataacatagggagcataaaaataaggttttaaaggaaaacaagattcagtggtgaaatttgttcaagaatgttttttagaaggaaaacaaaaacaccagaagagggtttaaactatgccttcactgtcatcaacatttggattcccataatgaccacattccctgggttccctgccttttaatgagctccagatctgggaaagtaggaattaaggagcaagatacagaggaagggggatgaggggggaaccttagggcctttcttaggattcaagctcaggagctcactctgtatgggtccgtatttgtgagatctgaatctcagggactctggtgttaactttgtctctcttcatctctaagcgacctgtaaaatagcacatttcccacccggattctgaacaaattgagttataaaacaaaggagtggctggtggaagataaaacatcaacatttgggagtaaataagttgaaatatatcatttagtgataagagccaaaagggcctgtcatctgagcccccagattaggtacaggcaagggaacagctggatcaggacaggcctccccaagactggaggctgagcacctgctcccagagggagctctcccacaaaaggatgaagccaatgtggaggcaggcaagccagattaattcttctcaaatgtactaatgaaggcagactgagtaaaggggatggagagaggcctgtgatgtagcatcttggagcttcctccccctggaaaaaagatcaagggtgggcagaggtgttcgccactggaggctcaatctgaggccccagcaccacctctctgtggggacgggaaggaatctgggtactggggcaggagcaaatgtcaatgttcagtatgttttgattttccatattcagtcccccatatgtaaaaggctatgttcccaatgtgtgataagtcagttttttaaaacataaaattttgggcattctgttcataagatgtaattgaagcacctcctgctctgcaaatccttctttaaagattctcaagagtatttgtaggtgtctgctgtggtttgggggcttccagaacctggttcttttcatatctcatatctaactctccctgagaaccgcagtgtcttgcttgataaaagggtactaccctgacgatcagccatgtgtatagagggatagaatgttttccagatataggtagaggagtgggacactgatggggagttgaagggggtatatggatctgtagatgtcatagaacatgaaattagtggagccagagaaaaacagaaatgagactcccttctaagacttaaaagaaaagtaatgggggagatatgccagaagtcctgccaccacccatgaccaaacatcagccagggttggcaggcagaggagatggtgcatgctgactactgtctatagttgaggatgtctgtagcaatggtgtttgtgattcaggaccaacctatatgtctgtacttgtgaagagagatacaagcaggcaaaggaccaatcttctgagttcttttatttgttaaaataaaccataagcatattgtccttcacatccataataggaacaatacatggcaataataaaaacaccgaaactaaaatcaccaataaacataatccaatgttattaggtcagatgcctctgaccaagctttggttcctttttctgaaatggttgtaagttttgctaagcacatctttgagctctggcctgcccatctcccctccctgtgccacactggctcaactcacattgaatatggagcttataagagctcggacttgacagtttaagcagtgaagggccctagaaggcctttaaacagatgatgtcataatcagatctgtgattcagggggatgactgtgcaggctctacagaagatggagaaacttctgaagaggcccagggccctaagtgcctgccatagaggccgcagtttcctatggagtgccccctacaccactgacgggtacagatggagggaaacaccagggataccccttagcttcatttcagccaaaatgtttctctttctttttttaacctattgatgtctgtgtaagagtttttttttttaatttaataacttttaaattgaagttagaatcatttgatttagaagtggtgtattagtagaggcaggtagactagctacaagtccattgaaattatactgataatatgcagtagtacatgataatagtaataatgataatcacagaaatacagcgataacagctaccattcattttatccttactgcatagcagtgactattttaagtgctttgtgtggtatattattttcatgataactcatgaaataggcacttttataattcttgtttaacaagtcaggaaactgatatatgaaaaggctaagtaacttctctaaagtcagatagtaacagggattcaaactccatgattcagaagtttaaccaagagatcctgcaatgaggaaagtactgatggatatagatgggacacagaagacacttcgaagggagaatcatcagttctttgccagcagttgaatgtagaggattgtggggagaagcggtgtaaatcatggataacttgtagcttctagttcatgcaactccttgtagctttaaaattgggcatatagcaggcgggaagggggctgtgtggggggtggggatgtggcatttgattagtgaacaaggagggattgaagtgtcagagacattcaggtgggagcattcagtggacaggtatatgcatggggctgaaacccagaagagaggaaggggcactggagcccgcagggcattggcgacctctggaagtggctgggctaccagactgtgtggacactgtctgttcctcctctttacccatcctgcctgtgcttctgccagaccagttgcttactgaacacttaactgtgtctcagccttccttgggcttattctttgtgtggaacacctgtacatctgtcctttccatgtttcattgtatgaacatttctctagaacattccttaaggcttatgccagatgctttccttctccttaaagaccaattcatcccccaactccaatatggtcccttccttaagtcagaacatatcaagaacacatgatatatctttttttaacttttaagttcagaggtacatgtacaggtttgttacatagggagatttatcttaatcattttaatttccccaacctactcctaacccgtagaatataaggtcttggaagaaatggactatgttttacctttttatattctgccttaaaaatcctcgtggaatggaattaactcattgtctgggaacatatgttaaatcctagaacttctttttcttgttttccgagggccttgctcctcaacctgcctgtctgtaaatatcagttacctctgccttctctcgtctgcaggggtacagttttcctcaaggctcctggcaaaatggaattcagtctcccaggctcacctttgcttctgcccctgagtgtatgtgcctacttacttttaagaatcttgatactaagtaataaattaaaaaaaagagatagcgagagaaataatacaaggaagttataactttccagaatcttatcccatgcctatagtcttgggccctagtctagaattcttagctgagttgcagataggacagtcctggctttttatcctgtgtttaccctgaagatacagttcaacacgctcatatccttgccagcttttagaaaaaaactaaagacttaaagatgggttcggagctgaatggcgtttgtcttggctcagctggactcttttcatctagaggccttcctactcaaaggcgacattctgctcccacaggacgctctttactcacttaactttcattacgagttgatttttgttctttggattttctcatcctacttttttttttttttttttttttgagatggagtctcactctgtcgcctaggctggagtgcaatggtgcaagctcactgcaagctccgcctcccgggttcacgccattctcctgcctcagcctcagcctcccaagtagctgggactacaggcacccgccaccatgcccggctaattttttatatttttagtagagatggggtgtcaccgtgttagccaggatagtctcgatcacctgatctcgtgatccacccacctcggcctcccaaagtgctgggattacaggcgtgagccaccgcacctggccccattttttttttaagtgagctaacaaaatgttcatcactaccacctctaccacctttttaaattttttttagttttttctttttttttttagttctttcttcaggccaggctttgtgcttcttgctttatgtgtatattattcatttgaaaccatttaataatatagaaagtaggcattactctttgcattttatagatcaagataccaatgctagaaacattgagccacttggctgaggctctgatagctccttattgactcaggtaggattgagacccagatggaccctggttgcgaagctggtccccttttcattgtgctttctcctccctgcccttcgtttttctacttttctgttcttatgctattgacgcttagagacctgcatgtcacataatctgtattttctcagttgggaccaggccaagtataacaaaaagttgcttcttgatttcaaaataattgaaaattgtaaaagacaatttttattgaatgcagtaacttttaaaataatgagattaacttttaaacacttactgaattattctacagttaaaagcaatactatagtttaaaacattagaaaaaaatgatacctttgatttatttttaaactcaactttgttattgttttttaagtccataaggcatttttgcttttattttccctttaatttagttcatctggtcttcctataagtctttcaatttgttttacacgtgcactaactgacctgagcatcttgctacttcattcaagtttatcctaaccttggaagctttctgtcttctagaatggctgccttatgcccaaaaagctgccccaacctcaagcaggaggtacactgaactcgagtacacggatggatgactaaagttccctgagtcctactggacagattttggttgtgtgttgtgttggtttaatatgaattaaggaatgagacacacattatatatttgtgtaggtataatttaaattgttaatgtttacacaactaaaaatataaacgacaaaattttctgaaaatgacatgtctgcaacagtctcttacaactctcctatcctatatgtggaagatgaaatattgttttcgggagaaaatcatcctgggttgttacagtaacaaatttttgaagggtatttttttttaaaatccttttagaacaatcctggcatttgaaggtctctgtttttgaacacccatagaagaaaatcttccaatgtgttcataagacagtggccatttttttccattctgtatgcctacaatctaaaaagtcttagttacatttactgaaaattcacagaagtgaatcttagactacagcagaccaacccttatgcaaatgattcgtgaccttgcaacatattggaggttccccataaatacttattgaattaaaacaaatttaaattacatttagttatttctttggactttaaagtttattcagttcagtgtatattaaagatgaaacctgtggttttatattcaatctcatactatgcaaaaggcacataatgtcagttgtcagtagaaatgctggctagtagagtgtgcttctctcaacattctgttgcttctcatttccaaagagcatcttcaatgtcttattagaccaacagtaaattatattgcaaattagtatttagaaaaacctctcctggccttgaggcacagcaatgttatcagacttcctaaattattcttccaactctacctttttgggaagtcactttatcaattctagtatgagtttcttctggtgaatagcagcaataataatctcacctatgtcatagggttgttctgtgggttaactaacatagaactctaatgtggcattaaaattttattttaaaagtggaaacctctctaagctgctgtacaacatcatgaaacgttatatttatcagttaccatttttaccatggatattgattgcctttgtgtaattatctacacctacccatattcattaagagccttccatttttagaaaaggcattagattattataatggcagggtttcatttcttcactttgatagatttccctattctgttactattgttttattgttattactaagatttactataatattagagaatatactttagattaaattattttaattacattaagtgatgcacattatttttattgagtatttactgtaatttacttagtaattcttaaatcaagggaacatgatggtactacactgaagggagtggtttggagcctgttcactactttgcagtaaacagtgggcctccctctcttcttttcaataacccatgactcttcaggcttcactctccagtctatgctcacccaccatatgatctcacccagttttatggcttaaaatcacatacataagctgattacatctctagcccagccctcttcctaaccgcagacctgacacctccacttggatgctgatcaggcttctctaacttaccatgtccaagactgagctggggtcattcctcataaaccactggctccttctgtcttccccttttaattaatgacagtcccctttttctacttgtttagcccaagaatcttaaggccttcttaactcctcatttcctctgatctgtcagcaaacccttgcagctctacttttggaatacatctagaatctcaccactgccactgctaccacaatgacccagcccactttcctctctcccgtaggttacaataattgcctcctacccctggtctctctacttctgtccttagtccactgcagtcagtttcaacacagcagccagagtgatgctgtgaaatgtaaatcatatcaagtgactcctctgctcaaagccctctagtctagtggcttcatctcagagtaaaggccaaagtcttgaatatcacctctaaggacctatgtgatgtggctcaccttagctctttatctctgtcttttcttactctcttctcattctcttctgctcattcaccctggtgtccctgctgttcctagaacatgccaggtaatcagccctcaccttcctctctaccacatttgcttttctttctttctggtgtatgttcttccccagatgtccacactgttagactgaacatctataggactgatagatctatagacctttatttaaaaatcaccttccatgttcccttcatttttctccctagtgcttattattatctgacatcttacacattttatctaattaccttgtctattatgtctcccccaaatcgaatgaaagttaagagcagaggcttttgtctgtcttgttcatcactgtatccctagtgcctctagtagtgcctagtacgctgtgggtgtttagtaaatatttttgaataaatactaataaagctaggctacaatttcatattttgccaatagatgtcactctctaagcctgtgctgtgcccacatctgattttttttagttccatattgttttacagaatgaaatagtttaacatttccaattgtataatttgaaagtgaaattactatgaaatcccagtgaagtcacatgtataaatggtgggcaggcatagcagcttaaacagctgcagtaggatttttgtttagattggtgctgttgtgatgtctgcaggaaatgtgcactattgcctgaacctatgcagctatcaaaaaattcaaataatggagaaatatggctctacttatattagaacatgtttgaaaataagtgtaatgttatcatatgtaatctaaagtctcagctgcattaagctgaccatctcctcctctatattatccacaaatcatgtacttttacttttttgagaaagagatttcaaggcaggaaagaagtagttttatattctgagtatacatattaatgttttgtactagtgtactctattttaacagttattttttattattttaatcagggcaacacaactatttatgtgctggaagaaatgattgcatcattgataagattcgacgaaagaattgtcctgcttgcagacttcagaaatgtcttcaagctggaatgaatttaggaggtaagttttgtatttttagtttaataaaaattgttaataggtaatgcaacagcactaagatctgtgtactctcaaaattgaaaacgaagccaacagggagcaaaggtttctgaaaatctgatgagttctgttttcatgctaaaacattttagaagagaaatatttattagctggagtcaaaaagaggtatgttttatggctatagttctagtgaatttttcgagcctgagtttgctaagtttcaagaactaggcacttaacaaaaaacaaaacaaaaatgaatgacttttatataaacccatagctaatagttcttattgccacgtctgtttagaaattagacctatatgtgataacattacccacatagagtacatacctaactttagaagtatgtgtaataaagaaagatatatatgaaaaaagctttgaaatgttacagtggctcatcaaaagaggaggagagggtaaaaaactagaaccaaatgcgaaagtatacaacatccatggataggaagactcagcatcctcaagatataaattttccctaagttaatctgtaaatatagtataattctaagaaaaataccaattgattattctaagttcctaaagaagagccaggaatattctagaaaagacaaataatgggaggaactagctctaccagataggaaagcatattatagctacaataattaaaatagtccgtggtatttgctcatcgattatcagacagattaacagaaggtcaagaaataaatccaaataatataggaattttgcacacaataaaactggcttttaagatcagtggagggatgggagattattcaatagaaaatactatgacaattggataaccatctggaaaacaagaaagttgaataccagctcttaactatatacaccaaaataaatgctgatgcttcaaagatttaaacttagaaaaatagccacagaagtactaaaagaaaacatgaatttttcttaatactctccaagtagagaagacctttccaaatcccactatctatgggtttcatattgcagattcaaccaaccatgaattgaaaacatttggtttaaaagataaaaatacaaaaatacaaaatttaaaatacagtgtaacatatatatataacatagcattcacattgtattaggtattataagtcatctggagatgatttaacacatacaggaggttgtgcataggttatgtgcaatactggattcaggggatcatggtggacaggaggcaggactagattgcagctccagaaaaagcagcatgcggaggcttgcattgtgaattttagctccagatccactgcaagaacaaaccagcaatcccgagaggacccacagaccctctgaaggaagcggactgctcccggaggacctgggagacaccccagttactgtgagtgccccaactgcagaagtgggaaagggagaccctcctctcctgaacacacacccccactggagaagctgaaggtctgtttgtgggagaagtttctgacttcacctggagctgagtcaacttagagagcccagtgaaatacaagggtagaagaagcagcagcaaggtcctgggagctctctgggtccccaagcagcccactcctacctgacaccacagggatccatcgggagggtggccagaggagcagggggtaaaactccacaaggagaaggaattctctagctgaactttgtaacaatttgaacagggtgagaagcctccttgccagaactcgggggatggcccaaatcaggcctgcagacttcacaggcaggggaagaactaaagcccttttctgtggctgctgggaggcagatagccttgggcaagtgttcaagcccctcttgccctctccctggaaacagacttgggctgttggggtggctcagtgggagtgaaaccagccctttagtttgcctgggagcagggtgaggcctgtgactgccggctttcccccacttccttgaaaacctgcatgactcagcagaggcagccataatcctccttggtacacaactccagtgaactgggaatctcgaccccaccccccacagcagccacagcaagacccacccaaggagagtctgagctcagacgtgcctagccatacccccacctgatggtccttccctatccaccctggtagcagaagacaaagggcatatactcttgggagttcttaggccccacccatcacagttccctcagcacactactacaactgatgctttctggaaattgccacttcctggcaggaggccaaccagcacaaaaatagagcgttaaaccaccaaagctaaaaaccctcacagagtccattgcacccttcaccacctccactggaataagtgctggtatccccacctgagagacccatagacagttcacatcacaggactctgtgcagacaacccccaatgccagcccggagccaggtagacttgctgggtggctagaagagagacaacaatcactgcagtttggctcacaggaaaccacatccataggaaaagagggagagtagttcatcaagggaacaccctgtgggacaaaagaatctgaacagcagctttcagccctagaccgtccctctgacagagcctgcacaaatgagaagaaaccagaaaaccaaccctggtaatatggcaaaacaaggctcttcaacaccccagaaaatcacacaagtgcaccagcaatggatccaaaccaagaagaaatccctgatttatctcaaaaagaattcaagaggttagttattcagctaatcagggagggaccagagaaaggcaaagcccaatccaaggaaatccagaaaatgataaaagaagtgaagggagaaatattcatggaaatagatagcttaaagaaaaaaacaatcaaaaattctggaaactttggacacacttttagaaatgtgaaatgctctggaaagtctaagcaatagaattgaacaagtagaagcaagaaattcagagctcaaagacatggtctttaaattaacccaatccaacaaagacaaaggaaaaagaataagaaaatatgaacaaaacctccaggaagtctgggattaagttaaatagccaaacgtaagaataatcggtgtacttgaggaagaagagaattctaaaagcctggaaagcatatttgggggaataatcgagaaaaacttccccggtcttgcaggagacttcaacatccaaatataagaagcacaaagaacacccaggaaattcatcacagaaagatcattgcctaggcacattgtcatcaggttatccaaagttaagacaaaggaaagaatcttaagagctgtgagacagaagcaccaggtaacctataaaggaaaacctatcagattaacagcagatttctcagcagaaaccctcaaagctagaagggattagggacctatcttcagcctcctcaaacaaaacagttatcagccaaaaattttgtatccagtgaaactaagtatcacatatgaaggaaagatacagccattttcagacaaacaaatgctgagagaatttgccaccaccaagctatcactaaaagaactgctaaaaggagctctaaatcttgaaacaaattctggaaatacatcaaaacagaacctctttaaaacataaatcacacagatctataaagcaaaaaaaaaaagttaaaaatcaaaaaaccaaagtacacaggcaacaaagagcatgatgaatgcaacggtacttcacatttcaataataacattgaatattagtggcctaaatgctccacttaaaagatacagaaccgcagaatgtataagaactcaccaaccaactatctgctgccttcaggaaactcacctaacacacaaggactcatataaacttaaagtaaaggggtataaaaggcatttcatgcaaatgacaccaaaagcaaagaggcgttgctattcttgtatcagacaaaacaaactttaaagcagcagtggttaaaatcctaaacatatatgcacgtaacagtggagctcccagatttataaaacaattactaatagacctaagaaatgagataaacagcaacacaataatagtgggagacgtcaatactccactgacagcactagacaggtcatcaagacagaaagtcaacaaagaaacaatggatttaaactataccttggaacaaatggacttaacagatgtatacagaacatttcatccagcaactgcagaatacacattctattcaacagcgcatggaactttctccaagatggaccatatgataggccgtaaaacaagcctcaataaatttaagaaaattgaaattatatcaagcactctctcagaccacagtggaataaaattggacgtcaactccaaaaggaaccttcaaaaccatacaaatacatggaaattaacctgctcctgaatgagcattgggtcaaaaacaaaatcaagatggcaatttaaaaattcttcaaactgaattgacagtaatgacacaacctatcaaaacctctgagatacagcagaggcaatgctgagatgaaagttcatagccctgaatgcctacatcaaaaagtctgaaagaacacaaacaatctaaggtcacaactcaaagaagtagagaaacaagaacaaaccaaacccaaacccagcagaagaaaagcaataaccaagatcagagcagaactaaatgaaattgaaacaaacaaacaatacaaaagataaatgaaacaaaaagctggttctttgaaaagataaataaaattgatagaccattagcaacattaaccaagaaaagaagagagaaaatccaaataacctcactaaggaacaaaataggagatattaaaactgacaccactgaaatacaaaagatcattcaaggctactataaacacctttacacacataaactagaaaacctagaagagatggataaaatcttggaaaaatacaatcctcctggcttaaatctggaagaattagataccttgagcagaccaataacaagcagattaaaatggtaactaaaaagactgaaatggtaactaaaaaattgtcaacaaaaaaaagtccaggaccagatggattcacagcagaattctatcagacattcaaagaattggtaccaatccttttgacactattccacaagacagagaaagaaggaaccctccctaattcatcaccctaataccagaaccaggaaagaacataaccaaaaaaagaaaactacagactgatatcgccgatgcacatagatgctaaaattcttaacaaaatactagctaaccgaatccaacaacatatcgaaaagataatccaccatgatcaagtgggtttcataccaggcatgcagggatgctttaacatatgcaagtcaataaatgtgatatgttacataaacagaattaaaaacaaaaaaatcacatgatcatctcaatagatgcaaaaaatgcattagacaaaatccagcatcgctttttgattaaaactcccagctgggcatactggctcatgcctgtaatgccaacactttgggagactgaggtgggaggatcacctgagattaggagctcaagagcagcctggccaacatggcaaaaccccgtctctactaaaaatacaaaaattagccaggggtggtggcgcgcacctgtagtctcagctacttggggaggctgaggcaggagaatcgcatgaacccaggaggcggaggttgcaatgagccaagatcgcgccactgcactccagcctgggtagcaaggtgagattccatctcaaaaaaaaaaaaaaaaaactcagcaaaatcggcatacaaggtatataccttaatgtaataaaagccttctgtgagaaacccacagccaacatgatactgaatcgggaaaagttgaaagcattccctctgagaactggaacaagacaaggatgcccactgtcaccactcctcttcaacatagtactggaagtcctagccagagcgatcagacaagagaaagaaataaacagtatccaaattagtaaagaggaagtcagactgtcactgtttgctgatgatatgatcgttgaccttgaaaaccctaaggacccccctagaaacctcctagaactgataaaagaattcagcaacgtctccggatacaagaataatgtacagaaatcaataactcttctatacaccaacagcaaccaagcagaaaatgaaatcaagaacttatccccttttacaatacctgcaaaaaatataaaatcaaatgtgtaggaatatacctaagaaaggagtctaaagacctctacaaggaagactacaaaacactgctgagagtgttttgaaagaaatcatagacaacacaaacaaatggaaacacatcccatgctcatggttgggtagaatcaatattgtgaaaatgaccatactgccaaaagcaatctacaaattcaacgcaatccccatcagaataccaccatcattcttcgcagaattagaaaaaaataattctgaaattcatatggaactaaaaaagagcctacatagacaaagcaagactaagcaaaaagaacaaacctggagacatcccattacctgatttcaaactatactgtaaggccatagttaccaaaacagtgtagtaccggtataaaaataggtacatagaccattggaacgtagtagagaacccagaaataaacccagatacttagagccaactgatctttgacaaataaacaaaaacataagatagggaaaggacatttcaacaaatggtgctgggataattgcctggccacacgtaggagaatgaaactggatcctcatccctcaccttatacaaaaatcaactcaagatggattaaggacttaaacctaatacctgaaactatgaaaattctagaggataacattggaaaaaacccttctagacattggcttaggcaaggatttcatgaccaagaacccaaaagcaaatgcaataaaaacaaatataaattgttgggaccttattaaactaaagagcttttgcacagcgaaaggaacagtcagcagagtaaacagacaagagagtcagcagagtaaacagatgacccacagagtgggagaaaatcttctgtacatctgacaaagggctaatatacagaatctacaatgaactcaaacaaatcagtaagaaaaaaaaatcccatccaaaaatgggctaaggacatgaatacacaattctcgaaagaagatatacaaatggccaacaaacatgaaaaaatgctcaacatcactaatgatcagggaactgcaaatcaaaaccaaaatgcaataccacctcactcctgcaagaatggccataatcaaaaaataaaaaaacagtagatgttggcatagatgcggtaaacagggaacacttctacactgctggtgggaatacagccaccatggaaaacagtgtggagattccttaaataactaaaagtagaactaccatttcatccagcagtcccactactgggtatctacccagaggaaaataagtcattatttgaaagatatacttgtacacgcatgtttataacagcacaattcacaactgcaaaattgtggaaccaacccaaatgcccatcaatcaacaagtggataaagaaactgtgatatatacatatcacatatatcatatatatatatcacagtttctttatatatatatatatatatatatatatatatatatatatatatatatacatacatacacacatcagtatgatggaatactatgcagacataaaaaggaatgaattaacagcatttgcagtgacctggatgagattggagagtattattctaagtgatgtaactcaagaatggaaaaccaaacatcgtatgttgtcactggtatgtgggagctaagctatgaggacgcaaaggcataagaatgatacactggactctggggacttggggggaagagtgggaggggggtaagggataaaagactactacaaatatggtgcagtgtatactgcttggatgatgggtgcaccaaaatctcacaaatcaccactaaagaacttattcatgtaaccagataccacctgtaccccaataacttatgaggaaaaaaatagattatgtacaatactgtgccattttatatgagagacctgagaattcatggactttggtatctcagagcaggggataagttttcctggaaccaatcccctgaggatgctgaaagatgactatatgaaataaactcagaagctataaaagcaaaaagttgagaaaatgaacattacttacaaatcaaatattactgcaaaggccttaaacaatatgaaactggaggaaatacaacttatagacaaagggttaatttttctcacagataaagagctcctataattttataagaaaataaaacccaactcattaaaaaaatgggtaaaggatatgaacagaacaattgcagataaaagaaatacaattggttcttgaaacacatgaaaagattctaaatctaatcattataatagaaatgcaaattaaaaatgtaatgagatgttattttttttgacaaggataaaacatttttatgacactgtttgatgagagtatggaaataaagttaaactcattgatgatctcctgcatttcaggtgggagaataaattggtacaacccctatggagagcaatttggctatttcaataaaatgttaaaaggcacatgccttggactcaacaattccacttttaggaatttatcctatatatattcttgcaatgctagaaatgatctctacattaaatactcattgtggtgttgttaaatatcagaaatttattaaatattcatctgttgaggatggattaaataaattacagaatactcttcagacattaataaaaataaagggaactctgtatatactaatgtggactgatctcccaagtagtatttagtcaaaaaaaatcaggttgtaaaatagatatacaactcatagcatacaaaatatgctattttagaaagcatattgtatagaacatttctggaatgatgtatgagatgctagtagtggtggtcatctctacagagaggacttgggtagctagaagatgcgataaggaaaactaattgtcactgtagatccttctgtgcctttgaattttgtattgtgatggaagcatgtgttgtgtacccatattgcctattaaaaaaaaagtagttcaaaaaactaattaaatgagacttcattcttctttgctttgatcaatgaattaactggctggctgatcaggaccagggagtaaacaggacttcctacagagtagagcaactcctagaaatcaagagaacagtgagcttggccttactgctaatgtgaggacgtgctccaagtaccaacaccaaatcagagagagggccacactggctaagggggcatgccctggaactagactgtgtgggtgggagccattgctctgtcactcactgaccttgtaacctcaggcaagttatcctttctttgtgctccagtttctttttcctcacattgcattgatcagcatacctacctctcagactgtgatgagatttgatgagtaaatgtatggtgagaagaaagcgattactgagtgtgtgttagttggcagtggcggaggtggtgaatgtggggtggttcgttgtggcttccgtagtgctttcacacattatctcattttatcctaccaacctctgaatccccagcaaaggcattatggccccatgttttggtaatggtgggcctctggtgcccagagaagttaagtggcttgcccaggcagtgagataattaaactagattttgaacttctgagctccttttctggtgtctctagtgcaccaccatgtccccttgtctgatattggaatcattgcagatgtggcccaaaagattaccctctgtagtatgtgagtgagaatcaggagagattattaataatttaaaatctagatgacacaagggtacagccattggttgtaaagtaaactcaatctattttataaaatccatcagttgatttttttaaaaaagcacttgctaggaaggtatgttttaatgtatctttatataatgtgtagagtactttacaaataatagcatatattacataaaatatataaatattgttgtaaatatgtatatgaaatgtatagtcttattcacgctgtaatatatggttactattggttactataaaaataaaatgcctatccttatcattcttttttttttcttttgtgagacagagtcttgctcttgtcacccaggctggagtgcaatggcatgctcactgcaacctccgcctcccgggttcaagcgattctcctgcctcagcctcccgagtagctgagattacaggtgcccgccactacaccaagctaatttttttttttttttgtatttttagtagagttggggtttcaccatgttggccaggctggtctcgaactcctgaccttgtgatccgcccaccttgtcctcccaaagtgctgggattacaggcgtgagctaccgcacccagcctatccttatcattcttacctcatagggtgttctaaggattaactcagtcagtaacttaaaacaggatttcttaatgtctgcacagttgacattttgggcctgatagttcttgttgtagaggactgtcctgtgcatagtagggtgtttatcagtgtccctggtctctacctactagatacctgcggcagttcactctcctccagttgtgacaactaaaaatatctccagactttaccaaatgtccccttggggccatggagcattactggtttagcaataatagtaagaaattattaggtattattttctgttgaactatacattccatcagaggaggaattgttttttatttgttgccttatcctcggtgactgcaacagtacagggcacaaagtttggtgttcactggctattgattgaatacatgaataaacaattggcatttttgagggcttgctgtgctctgagcactctgctgagcccattatatgcactgtcccacttaaacctcacagcaacactatgagatacatactcttcatgtgtccattttacaagcgagttaatggaggcatggaggttaaaaatcatcatcactggtcatcagagaaatgcaaatcaaaaccacagtgagatatcatctcacaccaattagaatggccatcattaaaaagtcaggaaacaacagatgctggagaggatgcggagaaataggaatgcttttacactgttggtgggagtgtaaactagttcaaccattgtggaagacagtgtggcgattcctcaaggaactagaactagaaataccatttgacccagctatcccattactgggtatatactcaaaggattataaatcatgctactttaaaggcgcatgcacacatatgtttattgcggcactattcacaatagcaaagacttggaaccaacccaaatgtccatcaatgatagactggattaagaaaatgtgacacatatacaccatggaatactatgcagccataaaaaaggatgagttcatgtcctttacagggacatggatgaagctggaaaccatcattctcagcaaactatcataaggacagaaaaccaaacaccacatgttctcactcataggtgggaattgaacaatgagaacacttggacatagggtggggaacatcacacactggggcctgttgtggagttgggggcagagggggaggtatagcattaggagaaatacctaatgtatatgacgagttgatgggtgcagcaaaccaacatgacacatatatacctatgtaacaaacctgcacgttgtgcacatgtaccctagaacttaaaatataataataatagtaataaaagcttgcccaaggccaccaagccaggaagtagcagagccagaacctagatctctgttgctggcagcaaagcctatgcctggcctcactcagcaggtcccctgtaggcaaagtggctcagctatcttttaaaaacagccatggtacaagtgtttagctggcatctgcagttatctataagtgaggtttggcacggtatgtgatacaaaattcacataatttgttactgttttctgcctatacaggataggttttatgggttttggtaaaaaatcttgctgaaaaaagctcactctgaatcttgaggtcctttaaaaaagtaggtgagtcaaaaatgggcagagtgaaaactggtatttatgaaagcaatatttactttaggtttaagttataatttaaccacttctggttcatgaattaaataattaacttttattagttgtccagttgtgtacattgtaattttttttcttttatgatttatttcgaagtcttgcttttagtttcaatttgggagaaagaaacaccagcaatcttacacttaaaaaagagaatgtgaagtttaacttctaatgtgaagcaatttctaaaattaaaaacatgaattaaaacccttttatgcatgtctcgatctcaccgctgttttcttagcaaagcaaagtggtccagtttcttttacccgccttcttctttactatctcttttgaggcatatggcaacatagcgtaatacttggaagaccttttcttttagcaaatgatcatgactcctggaataaaatccaaaatactagagaatatttttttcctatctgattagttggttagcatgtagtcctaatcatgtccccaaactggcctctcctttacaatgtgggaggaaggaagaataaagagtgcatagatttgtatctctcagaaattaaagctatagaatgtgcctcttcccatttctctagacccactccctccctcctgccactagtactattctttttccttaaaatcctgctgggctgtaggcagcatgcaaaggaaaatacagcagaagatgtgagaatgtcaacagataaattgaaaggaaaataacagttctttgactctaagctgagcctgccactcttgctatagcccacattagtggatctaaaaaagccccgtggctctctgtacatgagaattttctgctttgtgtagcttttttcaaaggaattaattcacttcacttttaccagtgttctgaagggagtggtctatacatgccttttagagcttttcctaaaatatgtaaagcatagcactaaatttagccagccgttagaccaagaatgagtcctttgaagggtttctagcttgactgccccctggccatagaatatagaggggatcatagagtttttcctattccagtcctcccattttacagataaggaatttggagtccaagatagtatcattagatacttgaaaaatacagtgtaaggatcctaattagtcctcttcccttctttctaaactacccctctcacttcacatttcgataggacttgaagtcctctttcacattcctttagtgaagacactaaaatactaaaatcatgcttcctgtaactttaaaaaggtagactttacaagccacagcatatttctgaaactggttcctaattctggttccaatgtacttccaacaagtatctgtagttttccttaatctcagaaatcactgagtttagcaggatcctgtaaaggtggccatatcacgttccccctttccctcctagagtgggacacgtcacaggaaaagcgagaaggatctaagacacaggaagcaggagcaacagcagacatcatggttgcttttgagggttggagagaaggcaactaggggaagagggaagggaaacaacgccaatactgggaatcattcactaaaacagatgctcttgtacattactgataacaatggaaccacagtggggaaaacacttatattagaatacatccacataatgcaatattaacgggccaataaaattatggccatgaaaatttataacaacatagaacagcttctgaaaaaagaaactaataatacaaaattagtatgcaaaattatttaggtcacttactctgtgattacgaccacactaaaaggtttgcatgagtcaaaagactagaaggaaatgttagaacaccaaagatggtttgctagtgaagtaacattatgactgcatttttttcttatctcctttctagtttattaataatatgagcatattttatgaaatttaaagaaaaaagctcataattttgaactaaaaagagaagcattaacactaacagtgttagtaagcagaagagataaagacacacagatggccaaaggagttatccctgaacaggaaggaggaaaaaagattttttaaaaaagccatcagtaagttacctgctgtgcaatacttttaaaaactgaaatgtagaagtgagcagaaaacaaaagacccagagaccaaagaattaaagaatcatgactgccacaccaaacccagagagagatctttttacttgaagaaaattggctttacctgccagcaacttgttacaactagttggcatggtcacctgcaaaactcacagtgtgggtctggtgagagaaattacaggatcaacaccagcaagagaataggtttaatatctgaaatccaataagagaaacaatttttatgtctttaaagggtctcccaaggcaggatatgcagtagttgtagaagtttagaaagcccaagtgtattgagttttataaaagagatactattcctcagattttttttctttccattctccttgcttatagacaataagaatttcaatgggacttttgaacagtaaagttgggaaagaataaatttttataagtcagtgaaagtgtggtttttgcatcttcacatataaattaagccatattaattgtcatagtaatataactgttgaattaaacaactggtgtttttacactgcagaatttcatggaggaaattcaggattggctctaaagcagatagaatttaaaagaatttgctgtatctcttttaaagactttttttcttttaaattttaactcttgtgattataatttgcgctcaatatatacatctaatttttgttagtttccttcaaaactctcattaaattggtgtcttattttgtgaatgatgacatcttagaacagaagcagtgcaggcattgaatgccaatgttcatccctccccagaaatacatgcagttttatgaactcactcatgccttgctgagcttacccaaggagtctgcttttcttatgtctttttaaatataaaattcagggatgttggaaaaattgggtatacagataccctctgttgctttcagttttcctttacctttttcactgcagtctgtcctggtagattgtcattctagccttccttaaagggcctgagagcttagcatttcagactttttgggcataggaaatcttgtcatttgtcctcggtggtctcaagagacctataatccgaactgtcctttctctttccaagtagcatcctcaatacacagttctctttgggccaggacccccagcaacctcccagtttcacacactcactgatattttctgtaatacacaactgctaactctgttaaaatcgttttgtggtttttgttcatgacacctcacattgttacattatttcaggtcactgcagataatggagttttattacagtattaataattgcacagtctttgtgaactgctggaatatcactcaggatataagaggctttcaatttctaggactttctctttgttttgttttgttgtttttttttgtttttttttttttttacctgcttctttctgctattttcactctacctctctttgtcctaacatgttgcttttgcatcctcgtggttttcagtacaggtttctacttaatatattctctctgcctatctctcagtgtcattgacacctgagtgtcctgcattcaaaattcccaagaggagggtccagattaactggtcagtcaccacccagaacagggcttccgattgggctgagagaatatagacaatgtctgcctttgaccccttgccctttcctcacccaggctggtatggtcagatcacagggccctttggtagaaagcgggagaaccttttgagaaacattttgacccaatttttcagaaaggaactgtgactgtaacaatcagagtataataaacacatctctactacaaacccataacagttacaggcatctgctaattgcagaacatccttgaaatcgtggcaaaattttcaatatcctaatttttatttacgtattttatgttatccatacatttaaaagtgaaaaaaaatcagttttcaataagcagattatcaaagcgaaatattagcttcatgcttcttggaacagaactactgaaggcttttttccagacagagtctcactctgttgcccaggctggagtgaggtggcgcattctcagctcactgaaacctccgcctcccgggttcaagtgattctcatacctcagcttaccaactagctggtattacaggcgtgctccgccacacccagctaatttttagtagagatgagggtttcaccatgtttgccagactggtgtctaactcctggcctcaagggattcccccgccttggcctctcaaagtgctaggattacaggcgtgagccactgcgcccagccctgaaggctttattttggagtcgaaaacgttttacttatgcctactttgaaaacacacgaaccaaaacaagacagaaaagcataaatgaagcatatctcggaagctttaaaaaattactaattaatgtgtaaggtggacattctcttgtagaacattatctctataactaaattgttctctgttactaaatgccagcactgaccccaggccccaagactgaggataagttctggggtgagggatgagatgagggatatggagatattaggaaagggaggacagaccacttacaaccaagcatcataggttaatacactcagtcatctcagaaagggatgatcagccatcctaggtaaagtatctgcttgctccctgagaattgactggtgtcatccgcctcagacttttctcaaagttgtaaacattgcattcacttactttctgtgaataggtgtgtccactgaggaatataacttaatgtttttttatttgcaaatctagtggctaatgatctgattattgttggctttctgaacagacatcctattttccccattttcacactgaattatgttattgtgaagatggagaagctgtttatgttacaataaagtcctctgttctcagctctagaatgtaccgaaaaccattcagctaactttccttcagctaacagtccttcagtcttagtagtaaatgtatgatattcaatatcattagtatcttttcagatgatgatttttctggacagataatataccttaaaaggcactaacccaattctaacatattttaaaactattgatttgtcaaattataaaatgcgtactcattaccatgattaataaaggagagtaaaagttatttgtaataaattgcaataaagatggagtaagagtcaagtgtttgctgagcacttcatttgctgcttaaaaaatgatgatttacagtttgacagagaggttcttaaaagccgagttagtagagctaataaaaatggcttcactagaatgtgctgcttcattattttgaaaagaatacttaactacaatatgaaggcagtttctgatttaggtcatgaaaataagaaactccaaaatgtaattgttcttcttccttcagcgtactaatgtgaaatattttaaatgggaatgaaaataagcgtatattgttatcatataattatttttcatattaagattaatttgtatagggggatcacagtgtttaaaaagtgtatctctgatgaatccattcatttattcagcaaaaacccatcacatgcctctgacatgccaggcatcccatgcaatgctgtgatggtgataataagaaggtaggcgctggccttgctctttctaggagctaatctttaaaatgaagaaatttattatagatctgataagcactggaaatttagcaaagagactcaaagagtgccttcagtgttgataatggcccaaatccccagagttctttctctttgcttcaaagtgatatctgtaactccttgacttctatctactgggaaaaggtagaggcatctcaggatggcttcatgtgactgtgtccctcactacattggtgggttcatcccagatgctccctttgtacatctgtcccatcaaatggccctgtgctatctactgatgcttgcatgggtgctgtctggaaagagcagctctgcctccagcagtcttgcagaaaacccactcaccttcctacctgcagaccacctcagttataatttcaacatctacagtagacagagttgctccctgaactcagaatatgaaaatcggcccctcaaattcttaccaaaaaaatgaacccagttttactgtaaaggtttctagctcttgtaaaagatactaggaaatgcctgggaggcaggctaagagtagggtaacctctttctagcagctgactttctttcatctcccttcagctctggaaccaccttgacacattactgtttccccccagaaactctttgcatctgatggtcagcaactgctagagaagctgggaggcaagctttatgaacaatttaaaatttttatttttagtttattttagagatggaatcttgctgtcgcttaggctgtagtgcagtggtgcagtcttagctcctgggctcaagtgatcctcccgcctcagcctcccgagtagctgggactacaggcacatgcctggctaaaaaaatttttttaaattctttcagatttctttcaattcagttttcttactctagcagtcttcaaatcaagccattcttaattctaaaattagactaattcacaagtaaaaattcaaactgtttcatctttatttacataggaaggcataaaatatactacagtagaaaaatagaaaaataagaaatgaaagacatgttggaaacattttcatatgttaattagatatataatgcatgcatataaatatatatttttaaagcaaaaacttaaatttcatggcattaaaaacacttttctatcctatatatactcatatttttagataaagttgagtcagattagaaattttaagccaaattcaaaagcttttgtggaagaatgatgggacgtctaggctgtaagtaagccatcctgttgaacagttctcactgcagctcagaatcatctgtcaagtcttttaaacagactcacccttgccctcctcctagagattctcacacagtaaatctgaatggagcacgggcatccttccttttctaggtctctgttgtgcaccagttcaccagggctaggaaccgctgctccaagggttgctgacattggcagcattcttcttaggataagaaggtcctttcattggtttttttaaccggcctttagttgtttttttgtgtgtgttttgttttgttttttgatttagtgttattttatgttttttgaggaaatcactgatcagcattctgtaactatttcttcattgggagaagtccctgaatacgatgtttcaagttaatgtatttgcattttccttgccaaccctaacatagccttacaaagggactactgactttaccagttttgtagtctactgactttaccagttttgtatctcactagtaacttttaaatatatttgataagctgtacatttaaatgctacagacatttggagtagagcacttaaaacgtgaagattaaggtaggtccgatatcgttggagaggacaagcactgaaacagtgaccctacttcctggtattgggaagtcaagagtggggaacagtcttaggatgaaaaccgaggaggagaaggagggaccctggcatggcttgtgattcattaagagagaggaaaccaacctggaaatgctaccctaagtgctacttcacttccactcatctgccccacctcagaccctggacgcatgtagacatttataccccctggggagacgcagagcaaagggaactggggttatgccttgccccctacatgctccatgccccaggctcccgccatggttgcctttgctcgtgctggtcatcagtacagtcagacagaaatgtctgtgcatagctagtgtcttcaggcccccaagtagatgtgttcaccattctgtttgttcttcagaggaaataccctctggaaccacctcgttgtcactccatagaggtgatttgggtcatgccattgaacttttttagataatacctgagcgatgatgctattgttggttttccaggtgttttatgggtgaagaaaagtcctcatctgacttctgagtattatataagagattcgattaaaatactctagagttgaaaaacagatccagaacaaaggggaaatttttaaagggttgactttatttgctttatttactctgagactcactaactgtcccattcccaggcaggctttcatatccattagctctgtttttgtcaaatcatttgacttatttttttaataaacaaaatctgaagcttccattaggttgcttgaaattcaaaacgaatgggattctatgactgaacataaagcagtgaacacaatgctagtttgttttcaacccagaaacacacacacccatttttgtctttgccttcttcctcaccccttgaaaggttctgagccactcccatgaatcttcttatgctagggatcctaatacctgcctccccagccctctccacacagtcgggggctcctcccgcccacgctccttcgcttcagtgctgaagcagtttctgctgtgtcagcactgctggtttgagtaacagggccctctttgtcagctacaacaagggcctctcatttgtgccagacacataggaggaccaagaaggaagccccctggattcctgtgggaattagtttactattgctgctgtaacaaatttaccataagcttattggcttaaaacaacacaagtttattatctcacagttctgcaggtcagaagtccaaaatgagtcagcctgggctaaactcaatgtgtcaacagactgtgttccttagaggaggctctatgagagaattcacttgcttaccctttccagtgtctggaggctgcccacattctttggctcgtggccccttctatcttcaaagccagattaaaggcatcacttacacccctgcttccatcatcacatctccctttctcctggtcctgcctccatctttccccaataaggagccttatgattacatggcacacacccagacaattcaggataagttccctatcttccaatccttgatttaatcttcagagttccttttgccatgtaaggtgacacattcacagatcccagggattgggaggtgaagtcttcgttattcttcccaccatactatgtaatgacctatgtccaacaaaaacatgttgccactctgtcacccacctcattcccctctctgtccttactccctgacaccatccctcccttccaagaagtctctctgtattcttgctagtttgtgcctttgtcaacacagttctgagatggcccctacatattcccccgctgtgctaataaatctctgtaatcaactcatcacctccaggttaagtgtactcctcagagatcaacctttacacagtggggaaagctttcattcccttttagacagttttgcaatgttatatatgtttataatttgttaagacttttcctataaagcttttaatgacttccttagatggagttgattagtaccttctctgtgcttccagagcctttattatagcactcatcacattttattataattatttgtttataggttatttcttgccaaatagtctgaacttacaagaacagaattgtccttttgtctttctcttcagagcacttagcacagtagatgcttaataaatgcttattgaatgaatgaatgaataaacaaacatgccattaaaccttgcctgtttggccaaaaaataataatcacgacaaggtttggctctacagttattaaagacacaaaagatttcattataaaactagtcctataacagagtccaaacgatggtattttaacaaagttttagtgtaatattattttttccatccctgcaccaggacaatgcagtttccaaaaaacacgtaagtcttgatccttattgttgacttacatagcatagtttggcaacttcttaaatgataatatactgcaggaaaggcttatatctcttcagtccttggcgaggaattctaagtactgtttgaacttcttgattatgcttacttaactaaaatttttgtcaccagaatggaagacaatggggtgttgggatagctgttgctgctgttaaggcaggaatttcaatcctggtttgatggtttgtagtgaactttgaacctcattaggtttaaggtaaaagaaaattaggatgagttgacttacagtaaaggagggacaaataagcccccgagacaaatgtaaaaacacaaagaataagaggtaatagaaagaaaagaaaaccaagaatgaagcaaacccgacacgagtaggttaagatgaaaggtttagttgaggagcttagtgcagtaaactcccagggattatcaactaaattattattggattccatagtttctagaatacatgtaatccaaggtcagagtcaggaatctgtactgatttcaggtgggaggaacacctgtcttcccaggaacttcaagattgacaggaagcctcagcccttgtctgggtggccacttgagtagagtggaaataagcagtgctgtgtttaagaccgtgaacacaaagacagtggtgtagctccacctctgggaaatagagaagccttccagctgaaaaaagagagcattatcaggcaggacctataaggcagcaatactgggtccctgacctgttaggaactgggccgcacagcaggaggtgagtgatgggcaagtgccgccttctgtcagatcagcagccacattagattctcataggagcacgaaccctattgtgaactgcacattcaagggatctgggttgtgcatttcttatgagaatataatgcccgatgatctgaggtggaacagtttcatcccaaaaccatcctccccatcgctgtccaaggaaaaaatgtcctccacaaaaccagtccctggtgcccaaaaggttgggaaccactgctataaggcattcatccctgataaaaatgtgtgcctagataactggggagtgtgaagctgcactcgtgattgaagtaactctgtagagctcatacctggaaattccttcacattgcagtcatgtttaattgtgcacttaaattggcatggaatagggaaagaggtgcaactttcaaagatgagacatagaccataaacctaggggtgtggacctttttacctccaggtggtgtcagcaggaagtcgacgcttggggaccagtagcagcaacacagctgaaggaagtgtgcatttaggggaagccctgttctgtcacaggaacaaatattctttttaacggatggctagtaaggaagcctgttgtggaaatcccagtttgaattttgatttgagtgtgaatgttgagatcaaccagtcattactcatttttttatgagtgtaataacattcaggatatgtgcttgtcagtcagtacatacaccctttgggtgtggcagggtacttggccatgtcttgtgataataaacctgatattatgattacactaaactttggatatttctctagtggactgtgtacttgtgcttgtgtttcttgtaaattatgtttgtagattaaaagtgtggccctactactaagactttggcgtctaggaaactaaatgtaagttttaaataaacatatttaaaacatattccaatctcttacaatacccatgacatatttatggaatatttttatagaattcacccatctataaagcatgggggtaggaagtgaatgctccatcgaaggggagtggccagtccaggtcgagctgtttgttgccatgccaaagggagtggccagtttcaggcctaggcctatttgttgcaggtattgccagattcaaaaaaaattttttttcaagcagtgtcagaagtgcaaatgtttgtgtgaaatatgctaaattttgaaagatgaaaatgaatttttttattatgctgagttcacttttgagtttatgacttctgttattaaggaaactaactttaggagcataatgaattagcatgcttcttatttcagttttcatttgattgttttttatatacccaagatatttcatgatctttctagttcactattcttgctttaacaacttccttagtatagaccagtgaatctcaaccaggggtgattttacccctggaagggacatttggcaaagtctggaaatattttttattgtcacaattggaggttggggattgctactggcatcttttgggtagagggccaggaatgctgctaacactgtacaatacacaggaccatttctacacaaagaattatccaccccaaaatgtcaatgaagttgagaaaccatggtgtagaccgaatttttaatatctgtcctttccctccctccctctcttccttcctgttaacaaataatcttttctcagtttctctctttctcctgctttctgtaatctcattcagaacctttaggttgatagttctcaattctaaagtgcaggaaaaatcacatgggaagtttgttaaaaatgaagactcccagcctccacttgtagatactctgccatgtgtactttgggcagcccaagattctgcatcttgagtaagccctgaggcgattataaggaagatcacccattgaccagagtttgagaagaaatatgatcatctctgttttcatagtctttggctttatgtgtttcatcattgtttagatcttttatcatttgaatttctcagttatatcccattacttttattaagcccttaaaatagccatagcttttagtagttatttacactttgggaagtaagtaaattaaagcatagttgaggataaagagatgaatatatatatatttatatacatgattttatatatatataaaaaatcataaatcatatttgatccttatgagttgttgaagtagctacatagtatatcttacagggttcctttcccaaatttctaatttcttttctcagtcttttttgtaatatatcatatgtgtttctcagaagaagttgtttgagaggagctccctgcaaatacaagattaaaattttgtttagctttttaagcataggaaccaagtgagaaaaaaaaagtgtggactataacagctgataatattgagaataatttatgtaagtgatttcttaaccatactgatgttaatgttatgaaagattaactttccagagagatgagtttaggccatgtacagtgaaggcaatatggtcatcgtagatctattcatccagatgctgcttggtacttagaaaaaactgatgtttatgccaccgtagtgacctgccttcaggggcttcaacttgtatctaacattcacatgttatggtatattgatttcaattcacagggctttgatagtcaggtcaacaacaattctttagtgtcttcttgaaatttacagttagagtgatgcatggtaattattgggtactttatgaaggcatatttttggtacgtgattactaaacataggcacattacaaacataggcacatcccacacaggtaagacaactcactggctatctgctaaggagctggccaccaagagtcatggataactttgtcatctaactttgtagcttctcacggtaattctgaagaaactattttgtaaaaagctgaaattccatttggatggttttgtgtttatgccaaattaaacagatattacagtggttgttggatggccttgggagaggtttttagccttcccctcataattttcaccaaatgccttccaacctatcctaaataaatatcaataaatgtcttatgaagcaaatgtgttttcacacatttctctaagtccctcctacataacagttctggtgctgacaccgctaacaggccactgaacttgaaatggtgagtctccgtgtacatgccacctctatcagctggaaccctggcaagccagttcatctttctggaactttatttcctctcatctaaaatagattaaattgggtgtttcgtgaggtcctttctgggtctagaaggctctcattctcttagagtgcttgcaatttgggtactaaaaccttgaattgatgatgggcatttggggcagggggagattagtctttctgtgcatcacttgccccttccataaggaagagagggtcaaggtcaaacacactttccatcattcaacccacaaaaaggagcccatgctgctgtggctcatttaatgatgtttattgggccctaagattaagtatatagactgcctctttcctggagtctatttctggagtatggttctatgaagctaaaggcctcttttctttttggcttctccctgtttcctctctcttcagactctctcaaggttagaagtggcaggaccgcctgcttgtttgctgcccagccagagaaaacagcattaggtccccctggccacagggctgtcaggtcctctgctcctgtacttggctttgcttcttggagattgcttgacttacttttgttatcagcgtgatgctgggttgagccttgcctggaattgttttctaggtagactagcctagttcattggggtttggggtgaaacccaacatcctctctttccatttcgcttaacagtgttattagaaaatggtggctgtggttatcacatcaagaaaagtaacctggtatagagggtcagcaaagcatttacttattggtttatttgctctttctttcccttggttcagtaagcacttatttagtgcctactgtgtgccatgcaataaaatacttagataagttctaagcgtaatacttcagaaactgaacaaacgagttgagtatagagtatatcatgttgggcatggccttatgatctttatcctctatgatcatatctgtgaagggagaatatctgactataaaagagaatgtctaatcttaactgtgggtccgaaaaaaatcactaaaggctaaaaatgctctaaagggaagattatataggcttttgttagccccatttaaatttgggggttgaaattattatgagggttaaaaagagagttttacatagtacatgacttagaaccacatcacccattttaaaatcatagcacaaggttggccttattctaagtcagcagtgaagagctgacttgaatcctagtcaagagcttcactggagtgacagccatgggccaccttgtgacccaggagcggcttgtccttacactaacaaagccatcagtgaaatcatttgttgaagatccatcattgtttggacctaggaatataagtgtgaaaatcaccacatgcagcagactttgttttaaatgaagggaaacctaccattagaacataagcagaatagtaacaaggaagtggcaaacaatttgagagaagaaacgaaaactgttttgtttaatttctgtactatcaatgtgatgttactttaaaaattaatagcaatttaaatgtgaattgcagcccccagtctccccccaaaaaaactttcagaaatgacccagctgcccttcctgaactacccccattaaaatttccggaagtcctcccaggacgggtccttcacagctttgatggataacggctgactgtttctatccaagtctattgttcaatctcgtatgaatggaaaatacagattataaggaatcatgaaaaataaaaaacctttaacgttaaactttccccaaaagcttattttcagtgagttggtatcttacatattaagaactttcttaaatcctctcttggacccttttcctttagggtggtagggtatgactaaatgatagaaatatgaagaatacttttgaaactaaaatgggaagcacattcttttaaagaggcatttgttcagccagctgtgcagaattagatttcgagagagccaccaaagctctggaatttacactgcggcagaataccaaatgaaaaaacagaagttagtcctgtaaacagagctgggcagggcagggcaggcctgtgtgtctgcccccattctggccactctggcgtggccctgcccaccaccaggtcctcggcagtgccctgagacctgacggcacaagacatcatcaaagtgcctcaagatgctgcaataccaaccctgtgtgcagagactagctggaatccaaacaggagaagcaactgcaagataatcacttattcaaaaaaggcgattttgtttggctctgctttatctgggagtttccagaccaattcagtctgtatcctgaagagatcccagcctagaaaaataacttttttttgaagtacatgcatcattggctactattaattcttaatttagactagttttgataatgtcagtggaataaaatgtggagtaatatttaaatgcataaaagcaataactattaaggtttgctttctctttcctcgggcctatttaattttgccctccaacttgcatggcatcctgttaactcattaatatgtacttactatgcttttccttttttatgttagtactagcttctgacttgaagattgtttaaaaattctgcttagcttcttttgtcttgcatttgtaaaatgttcttaataatagagtgaagatactcagaaatacagactgttaaaacaattgtgaaaaatatttttgtatcaattcacaggattattattttgtttggttatctggctcatcatttctttttcttactaagcaattttaatagtttttaatggttcagttataatcgcagcattagtattcttgagtaaaacacagttttcttttcatataaataatgtaaaggattacttatgatttgattataattaaggtagtttttgataatatatgttaagtaatagttctttaagaaataattaaaattataatgatgtagtcataagtaatttatttcacagaaagactgttgaactaagagggaagaaatattttgaagaaaattaatagtggagataaaactctttcctggtgtatatatttttttattcctcattaaaagtttttatttcttagtacacaaattacactaatcataaaaaaaaattctgaaattaaatttaggcaacttccttagctgtcttagaagtcttgggtacttccaagtcactgggtataatcaagggaccaagatgtggaaaccactgcactaaagtagcaacaaatgtttagagggagaacagaataattgaaacagccctaaaaagtgatgtgcaagcaaatgtacatgtattatagtttaaatattctttaagtgcttattcaaggaatctttggcttaaatttttgttttttaaaaaactattacttagtgtaactgttcccctcatctatctgtttggtaagctcttatttttgtgtatcatatttgcttgatgtggaccctgcttgagttgacttgacagtttgaggaggtatgcacagggcccttcctggcacatttctaccactgtaggttccagcgtttaactagttattttcagcccaagcctagtgaagatcatgctagaacttgggaaggcctagtaaactaagctgggtgctgcagtccatttccaggtcactgccttttgtctctttctcataacttattcacccctgtgaccttgttagaacagtaatgtttcttcataaaacattcttaatgagtctatttaccttgcatgcccaatgagatcgtgtttcatgtaataaattctctactgagacatatgccaagaaggcagcccttgaagctgttaaagaattaactttttaactgagggaggggccatttgctgtgtgactacagctatcatagtgctatttttcttattttaaatgtattataaaactacttagaggttttcttttttgcttgtttgttttacacatgcacatacatcagtcttcagcatagttatcctcaaagaataagaatttacaaagcagatactctattttctaaagaatgtaaatttgatttagatatttacatctaaataatgatatatttgtctgaagaagttaccagttgcaatggagctcaggaactttatttttaataaaagaagtagtagggtctttccttagtaagttctatttttttatacagactgactagattgatttctatctagtcagataaaattgttaaattctcctccagttagaatcaaggtgtcacaacagggagcaaaagcaaaaagcctgaactgtctgtaacagtaaaataaccttccagtgtaaagaagttgactgtgctgcccagggagttagaaatgaaagcaacttgtgtattgatacaggttgttacaagcctcctatttaaaagactaatctctgtcaacagaggtgatccagtggtgaccttatagataatttagaaaagccattttagctgtcgatcctcttctcaccccctttgaccttctgattagatgtcattagatgttgtctgcaaatgtaatgggacttctctattgtagtttttcatgtcattacaataagtcacttccctctaatgctacttatagttattgcataagtcactttacccctctgtacatggtgataacacagtacctacctcatagtgtgcttatgaagacattgaatgggatatttctaaaaactgttatcttagtacctgacatatagattctccattaatgtagctctttactattttctccactaataaaataatgtaatctcaagattacaagaaaccaaagagtgttttttacatacaggactgagcaaacagcttgctttataatggtaaaactactttcaaaaaaaggagggtgggggtgggatagagcggagaagagagcacagaggacgttaggtgtttggttttttcccatggtgctagacattctctcaagcaggcattctgagatcacagtctgccctttgtgcatattttggaaacgtatttctgaaattatcttttaccacacatataaatataagggatttattcctgtttttcagaaaagtatgagccagagagatttctttcagacaaatgttaagtcaggaatgtacatcagagggtcttatttacttgcattgtagggccaccagatctcaataactcatttcatcactttcttctaccttagggcagaactgccctcaggcaagcaggatgcctgcttacctattatcttagaatttttagaaaagaatagtacatgttcttgctagtagtacattccaagctttctccataacacattccagaatgctgggaggaaattctcctaatgtctaatctaaatcccttcttctgccctttaaacccttcgtatcttatcttgacctcagtggaaatagaaaatagatgctccccatgatttagccaatgtctctttaagtttttgaaactgttattgggcttctcatagacctcatcctctactctggaataagtcaaccgcagtcttttctacctttttttctttcagaagcatgttttgtcctgagggtaaaacatgtgggtagaggatttgtcattttgttactcccttctgatactcctcaaggtctatatcagcacaacagtgacagggcccaagtaggagttgtcaggcgtaatcaatccactgtccacccaccctggcagggaggcacgagccacctctctgcctcaccactgctgcagctcttcctaagagatgccggagggcacttcagaattacagggcagcctcagccccatgcgacgcagtccagcagtggcctatcttgttttcattcaaaaccagccaggccttgagcacaagaaagctccagaagctttctccattgcccagagatgattaccagaagctatttaaatctctgatgttctgagtttcctcttcccctgaggttctttctcagtctagtgaggtccccagcctggccagacctcgaagacatgttgtctcaccttgaaaaccccttctgtgtgcacacattcctgagtttgattggcattaaaaaggggaggggggatgaaaaatgtacatattagaggagaaaaaaagaatatagctacagaaaatacaaatgccatgaaagtaatcatgctcaccatctgtctagccccagaagaacctcagaagcatcttcccagctttgtccctatctgacttcctgtctgtctccagtggtatatttctgttgtggggaatcatcttccagaaatttgttattgtctctgtaaaatcagagaacccctattctgactccctcagattcccttgagcccctctgcccagttctggcttctggcctaagggactttcctcttaggtgggtcaatggcacttgactccaggtggattcccatacagcaaagtgtcctggtcctcataggccttaggtgtaatctgcctcacaccaaaagcaaaccagggcttggtggaaattaccacagaggggacaggatagtgtgcgctcccatggagagagaaaacaacttctctctgccattgtctttctctccaaatatattgtaaatgccagtgacccaaaacttatcatagccagctttataaacctaattactttattatatatcgattcaacttccctaagattgtaatctcttatcagggctcagatcttgttagtcagcattacattgctcacaaactgggtacttcttatacaatgggtggatattagttatttgctaagtaataaacatataacaattgcaacaaatttatatttattatagatatagatgcaggtatctgtggatagctttacacacacattaaaatgtaatatatgaggccaaggcagacggattacctgaggtaaggagttcaagaccagcctggccaaacatggtaaaaccccgcctctactaaaaatatttaaaaaaaattagccaggtgtgctggtgggcacctgtaatcccatctacttgggaggctgaggcaggagaattgcttgaacccaggagacggaggttgcagtgagccgatacggtgacactgcactccaccctgggcaacagagtgagactccatctcaaaaaaaaaaaagtgtaatatatgggtactcactcatttggaatatcttttaaagtgatcagaggttgggtttgtgtttgccttagcatgttttctatatcaacaaaatcaataatgtgtgttaacttattaaattatgtagattaatctgagaatatttgaagacactttttaaaaaacaacctgtattcaactttcttaaccactctgagtatttataaacaattgaaatgctacttccttataatcaattgacaagctaattatttattgccctgggacccagttctactggtgtttattgcattgggattgatttagatgatctttttcctattagtgcaaattagttcttaaccctatagaaggatgacattgcttcctttggtttcatggccagattacttagttgccccctatctttgagagtactccttctctggcagtcaaaaggcaaagagaagtcatgcagataaagagatgaggaaagaacaattagggttattgggctgaaattcgtgccccatgtatgagggtgacgggagaaatggtctgttaaagaagatagttggtggtgggggcaaggggaagagaatgctgttactgttttgtgggcagtaattacatttggcctatgaacagaaaatatatatattttaatataacctcaatataacctctctaatgtttactgccaagacctaaaatttcgagacatggcatgaagcatttctgcaatcacagaattctcactttatttttttctaatgaaatattgtaattgaacaagattccatattctactatatatcactcttttactatactccagagggggaaagttgtcctgattaccatttctaagactaaagaatctttacgtggtgaaagtcctagtcagccatcattcggccacaacagtggcttgtcaaaagggtatgtagcaggtcataccagcctcaggagggtagagcaaagcaaaaaaaggaaatcttgccatgtcatgtttcaaagctcttgtgaatcttgagatctcattagaaatctgtcacagttttaatagagtcccaccaagatgtgctctgcctgctcttttgcaggttggtcaggataggaagcagggcctccccagtgccagttcctcggggaacaattcacgagaatctaaggagttgtctcccagcagtgccaggaaagagtggctgccaaaatgttactagtaattaaggactaggcacctgagggcagcaactaagcacatactagttattataacatccaggtagaacaaatgaaactcctcttttaagtgagtttaattgggactgggagacatttacagtcacattaatgtaccctgcacgtgcacacacacagatacacacacagctactgttgctggcaatggagaaaatgctgtttgggtctggccacctgggaacatgagatcacaaagctcaatggccataaactcaatattgatttagtaaggtgctaaatagtggtaagctcccaaatgtatgttcactgatgcttttggttaatagaaacatgttccttaagtatcttcagccagcaatgttcctgtgtaattagcaaacatcttaattacacacttggatttgaagcttatgctagctaatcttaaagtataaaaattgtacaaattagataaagagaaaaggtttagaagagagactgcgtgtagcatagaggttaagggcgtgaactctgagccctagctggattcaaatcctcaccctggtatttactagctctgcaatatgaaaaagtagttattctttctgtgtttcagttttttcacctgaaaaatgaaaatagtgcctatcatagggtcatggtgagcattggaatgctgaaaacaagtaaaagctcttttgaactgtgcttggaacatgaaatgccaaatacatttagcttattttagatacggtattttaagagtaataactccacaagtgggtcattacacagtagaaattttgaaaaggaataataattaacaattcagaaattttatcataaaatctcagaagcttgcccacatttcccacagggaagtaaactaatactttatatatgtaatagtttgttaacgtttattaaaatttttaaataaggtcaatttattcaacagatatttttattgagtacccataagcatcatgggaagtgatatgatgttatagagatacataagacattattacccactttgaagagcttaaattttacaatatagcatgttttagaacagtataaaatattcaagcattttagaaacattactttgatataaatataatgaattaagtaaccgtatttttggcccttttagaaaagatattgggtaaatacgcatggctgaagatacactggagatatttattaccttgaactattggagtaaatatgcattattactcaattccaagtgtcctacatatattcacaaaatcacagtataaagttaaatgtacctgaaatgctaaatgtgatgtcgataatcagctccctaggtttatgctacagaccacagccttgtgtgtaagtgctggagaaaatattaagtattcttcatgacatttcctatcattgaccttaaatcagctgtgagaataagcacagcattgtagactgaaagcctaaagcaatatgaattttatcattagtttgcaaaaaaagtcacttttaataaaatttgaaaatatcaccattggctgttctagtcaataaatcatggttatcgtcagatgtggtcctataaaggatgagaacatcttaatgtgctggaatatttttaatgcttacaaaattatgggggaagaatggaagtgacattgacatgttatttcagatgttaataataatttccaacatgtttttatttgtcatacccatttagttctctgagagataagagagggagacattgtcatgcccatttttcaaatgaatcagttgagacttagaggagagtttatctaattgcccaaaagacaaattaatgctattgagtattttcttaagctctgatagagtcgtcagttgacgaggtttttagattacctgggtgctttgttcttttctgttttgtctagtttttgaggcactttgctgagtatttttcatttgttcactcatccattcatcggaagtatctgggttactagtgccggctcagcactcctgggcagttcttggtcagcatcttccattaacatacgtgaatatgatacatctgcttttccttgataaacagttctaaaaatcagatttctgtgcctcaaatcttttattaaagagatagtctataaattaattattgaagtttaaaaattttgttaatattaaacttcttaaagccagtagttatgtcttattcatcttttaagcctggttccaatatttaatatagcttttgttgtttgatagcttatcttttatctgaattgtaagattttctgtgatgaacgtgataaacattaatggctataattataaacacaaattactcttatttttaaatcaagttaattggtgtaacatagtcctactctacgttaaatttgtgtcctgtaagttctcatgactgttaggattaagtagaaggtgtctgtttgcttcaagaatttttaaataaattgaaatgttacatttgtaacgtaagtaattctcacatacctaagctcagtttggtgcttcttaactttttttttaattgttctctcattcatctgtcttcccaattatatatccatctacccatctacctcccaaccttcccacctcccccactacctccatcatattcgcatatgaagtaatttacccttcctctaaactctatttcagatacacaagatgtgtgatcttatatttcttaaactttctggtctctgtttccttattctacgatgagaatcataatagaatctactcataaaattattaaattagttaatttatatagagcatttagaacagtgcctggcattagtaagcattcaataaattttagccatttttggggtttttttaattatactttaagttttagggtacatgtgcacaatgtgcaggttagttacatatgtatacatgtgccatgatggtgtgctgcacccattaactcgtcatttagcattaggtatatctcctaatgctatccctcccccctccccccaccccacaacagtccccagagtgtgatgttccccttcctgtgtccatgtgttctcattgttcagtccccatctatgagtgagaacctgcggtgtttggttttttgtccttgtgatagtttactgagaatgatgatttccaatttcatccatgtccctgtaaaggacatgaactcatccttttttatggctgcatagtattccatggtgtatatgtgccacattttcttaattcagtctatcattgttggacatttgggttggttccaagtctttgctattgtgaatagtgccgcaataaacatacgtgtgcatgtgtctttatcacagcgtgatttatagtcctttggatatatacccagtaatgggatggctgggtcaaatggtatttccagttctagatccctgaggaaacgccacactgacttccacaatggttgaactagtttacagtcccaccaacagtgtaaaagtgttcctatttctccacatcctctccagcacctgttgtttcctgactttttaatgattgccattctaactggtgtgagatggtgtctcattgtggttttgatttgcatttctctgatggccagtgatgatgagcattttttcttgtgtcttttggctgcataaatgtcttcttttgagaagtgtctgttcatatcctttgcataaatgtcttcttttgagaagtgtctgttcatatcctttgcccactttttgatggggttgtttgtttttttcttgtaaatttgtttgagttcattgtagattctggatattagccctttgtcagatgagtaggttgcaaaaattttctcccattttgtaggttgcctgttcactctgatggtagtatcttttgctgtgcagaagctcttcagtttaattagatcccatttgtcaattttggcttttgtggccattgcttttggtgttttagacatgaagtccttgcccatgcctatgtcctgaatggtaatgcctaggttttcttctagggtttttatggttttaggtctaacgtttaagtctttaatcaatcttgaattaatttttgtataaggtgtaaggaagggatccagtttcagctttctacatatggctagccagttttcccagcaccagttattaaatagggaatcctttccccattgcttgttttcctcgggtttgtcaaagatcagatagttgtcgatatgtggcgttatttctgagggctctgttctgttccattgatctatatctctgttttggtaccagtaccatgctgttttggttactgtagccttgtagtatagttcgaagtcaggtagtgtgattcctccagctttgttcttttggcttaggattgacttggcgatgcaggctcttttttggttccatatgaactttaaagtagttttttccaattccgtgaagaaagtcattggtagcttgatggggatggcattgaatctataaattaccttgggcaatatggccattttcacgatattgattcttcctacccatgagcatggaatgttcttccatttgtttgtatcctcttatttccttgagcagtggtttgtagttctccttgaagaggtccttcacatcccttgtaagttggattcctaggtattttattctctttgaagtaattgtgaatgggagttcactcatgatttggctctctgtttgtctgttattggtgtataagaatgcttgtgatttttgcacattgattttgtatcctgagactttgctgaagttgcttatcagcttaaagagattttgggctgagacagtggggttttctagatatacaatcatgtcgtctgcaaacagggacaatttgacttcgtcttttcctaattgaatacccttaccgatctctacctgcactgcggtgcagttggtggtacatttcttaagtcctcccccactaggctgaacacttgttgaggaccgggtaaggcttggttatactgaacatattagctgggttcctatgcagcttatacagtctcttataggagacaggcagtgaagacttgtaaaaatgaatgaaagaaggaaggagtttgttctcttaataccaatagtaagtaataataattgagctttatatattttctcttagtggaataaacggtcatgttcctattgacataacaagatctatttagaggaaaactgtactttaaccagtgtgagtcagcatatttcaaacataattttaatttggccttatcatttatggtttcttatagcacgaaagtcaaagaagttgggaaagttaaaagggattcacgaggagcagccacagcagcagcagcccccacccccacccccacccccgcaaagcccagaggaagggacaacgtacatcgctcctgcaaaagaaccctcggtcaacacagcactggttcctcagctctccacaatctcacgagcgctcacaccttcccccgttatggtccttgaaaacattgaacctgaaattgtatatgcaggctatgacagctcaaaaccagatacagccgaaaatctgctctccacgctcaaccgcttagcaggcaaacagatgatccaagtcgtgaagtgggcaaaggtacttccaggtaggattgcctctcctttcacaggctgcatcctgaacttaacaagtctgggcaactgacttcgccatctccaaccatgcaggaggagtttgcgttctatgaaatcctgatatcagattttttaaattgataacaaattgatcaagtgtataggaaaaatatggttaatgtgctcatttcttccgagaatgcagggttaaggattttattgttaaaatgacagatacggctgggcgcagtggctcacgcctgtaatcccagcactttgggaggccaaggcaggtggcttactgaggcagatggatcacgaggtcaggagttcaagaccagcctagccaagatggtgaaaccccgtttctactaaaaacacaaaaattagtcctgcttggtggcaggtgcctgtaatcccagctactcaggaggctgaggcaggagaatcgcttgaacctgggcggcagaggctgcagtgagccgagatcccaccactatactccagcctgagcaacagagtgagactctgtctcaaaaaaaaaaaagaaattaaaaataaaaaaaatgacatacacttcttatgttgatcaaaatggaaaatttcatccaaaaatattaataaggtaaaatacattctgttcatgaaatcacaagttgagcacattattagcggctcataacgagggttaatctaagtgtagaccaagtaaggcaaggcctagcaagtaagttgtaagagacctggaatgactcttctgtctaaaaaataatcacctggcccccagcaccctttaaattgtccctggaattcctattttagtcatttttttttgtttcatggtatttaattaataaggcccctcttaatctacagaaacatcacttagaaattgccattacattgtcccagttcattaatctaaagcagtttcttagattacctgtggtcagacagcagctgtaaaagttggggaaagctccactgactgattctttgaagaggagcttgcccagtgaaactccacaggcagaaaaataacatgatgcccctggagatgggggaggtgataaaaaacaaaagaaggcctggtgcagtggcccatgcctgtaatcccagactttgggaggctgaggcaagcagatcacttgaggtcaggaatttgagaccagccttgccaccatcatgaaaccctgtctctactaaaaatacaaaatttagttgggcgtcctggcaggcacctgtaaccccagctacttgtgagcctgaggcaggagaatcgcttgaaacctgggatgcagtgagccaatatcatgtcactgaactccagcctgggcgacagaatgagaatccatcttaaaaaataaataaataaaataaagaacaaaagaagagcttgagtctgtcaggcagggaggacaggtgccagggaaacatgttctaccatagaactttatcaaagtctggtattaacctggaccataggaggcaccacatgctcattttttaagcaccacaaactcatgaacaatgaaatctcccaccattattgcagatacacagggtttgacagttattaaattaccctttattttagtgttattaattgtgggtgggacgaagcaagttttacaggttaatacaaattctctcaatctaaccaagggttttaggctgtcatccacactgaaacttgctgaactttgcaattttagtttgccctggcagtttaccctcatctagaatttaggatgaatttaaagtgaaatgtggaacaggactgggccagtggtgggcactctgtaaatgactgttgaattgatttgagtctgtcagaaaagagaaaagtgaaagaaaggtggctgtttggggttgacttaagaagcatcttcctggaatgtacttaaatgctaagtgtatttctgtgattaattgttttgttcttcaggatttaaaaacttgcctcttgaggaccaaattaccctaatccagtattcttggatgtgtctatcatcatttgccttgagctggagatcgtacaaacatacgaacagccaatttctctattttgcaccagacctagtctttaatgagtaagtacctattaattagccttcataaaataaactgcagagttatgcgttatgatttctttcagtaatttctaaacagatgtacgttggtgaaagaatctactgaaactggcattttttaacgttaaaaatttacagatctctgggaacttaaaaaattactctttgcaacattatactgtatgcttctgagtgtatataaatcagtatatataaattccacataataatatgtgggatatatcccaaaagaaagatgatccagttggctctgaaaattgactggtacaaagccacaattaatagaaaacagtctcttttggtatcgactccaattgggaagacaatctaatttctaggaaatgtgaatatataaagtgccagcttttacgagctcatataatggttcttttgttaacagtatacagctgctcaatgtgttttcatgacaatcgtaattacccttctttgccatcataaaagaagccaaactgttattctgtagcaaaacatttttagttttatgatgcattttaaaagactgaaagaatcgtaatcagtttttctttggccacaaattccttcctattttaagtttacattttaatactgtttgcattcctcattagcacattttatttatgtttgtatctagcagtgcttctttgtaattgttgggtcaagaaatacttaaaagggaatatttgaattatgatagtaactacagccatattctgacagatggctctctctggcaataggaaaacaggggtttcagtaggggaggaggcagatgagaaataggttggtgatgaaagcaagaaaagtaatgcaaaagatgaaaagtatagacagatagtgccaacacacctcagtagtaccagtagtaatttacctaagagtaccagttcgcccacatgtgatgtactgcaaagacaattttattccaaacataaattagaaacatcagttgttggttctcgaggtggcctgcttttggcaatttatcaaaaagagtaattctagtactgcatcagtgttcaccaaaagcatgaagtaaggccaaacaactgacttgcacaatttaattaacttgtattcctcaataatcaattgatattattgaatagtaagcccgttttaaaatatgttctataaaccagaagaaaacacatattaaagagggttcttgttttaaaaggacgtgagtaaataagaatctctattaatgccctcagcgtttgattttaacagaacattaaaacaacccatttaatcttattaatacatctattaatttttgtcataaaatgtgtataacataaaatttttcatttttaagcatacaactcagtagcattaattacattcacattgttgtgccaccatcaccactatccacatccaatacttttcatcatcccaaacaaactctaaacccattcaacaatcactcccctttatcccctcccctaagcctctggtaacctctagtctatgaatttacctattctatatatttaatataagtggaatcatataatatttgtccttttgtgcctggctcattttgcttagcctaatgttttcaatgttcatccatatttagtatgtatcagaattccattcctttttatggcagaataacattccatcatagatatatcaagtcagtcctcattagtggattctgtagttgcatatttgcttactgactgcatttatttgtaatctcaaagtcaatactcacaggatattcatggtcatttacagacaaatgcagagtaacaaagaatttgagttgccaagagagcacattgcagctgagctcacacaagggaccactccgccatcttgtttcagctctcatgctataaactgtcatccttttcacagtctatttattgccacatgttttgcatttttatgccttttggtgatttcaccgtttaagatggctggcccctagacgtagtgctgaagtgctagctagtgttctttagctcaagaaagctatgatgcgcctcacagagaaaataggtgtgtcagataatcattactgaagcatgagttatggttctgctggctatagttcaatgttaacaaactaggaatatatgttaagtaagatgtctttaaacagaaatacacacgaaacaaaattaggtatagatcagttgatgaaatgtaaccagaggttgtaaggaccattaccccaaacttcccctaggaggaatagttgaatatttgctaattcagtgtttgctgtgactttatagaacatgactacagcaaatattttatccaatcatccgttaatgggcagtttggttgtttccacctttgactattatgaataacgttgcactgaatatgggtatataaatatatctttgagatgctgctttcagttctttcagtacctagaattggaatccctaggcatatggtgcctctgtgtttaactttttaaggagacaccacactctttccacagcagttgcaccattttacattcccagcagcaatgtacaagggttctaatttctctgcatccttgccagcacttttttctttttattaactagccatcccagtaggcatgacgtggtatctcactatggttttcattttcatttccctaatggctaatgatgttggacatgttttcatatgcttatgagccatttgtatatctcctctgtagaactgttcatgtaagttctttactcattttttaattggattgtatgtctttttgtacttgagttgtaggagttctttatatattatggatattaaacccttatcagatacatggtttgtaaatatgtgtctcaacctgtggcttgcctttttactctattgaaagtgtcctttaatgcacaagcatttataattgtagtgaagtcaaaatctcttcttttgttgccttttctttggtgtcacttattactttttaattgtttgtaaatatctgagtacaaagggctccaaacaattacagaattgtaagaatgttttttcgtaaatggaacttaggggaaagcaccttatatttgaaggctgggaataatgtacttaaaggggtttagaaataaataagaaacaaaaaaaaagaaaaggtcatataagctttgtgtatttgtctattctagaaaatattgatacagataaaatggaaacaacaaaagataaatgctttctaatattaaaagtagttaaatgttattgatgtaattattagaatgaacattttgttctctgttcttaaaacttttgacctcaacccaacccagacttctgtagggtttctttctctcaactagaaagaatagagcaaagctgtgtttttcaaggggctagggtggatactattctggggaaacaattggaaattatataaagccttttggtcaaattgcatcaaaaagagagcttgatgtggtagctccatcactgggtaccatgatagaccctgtattttttagggaaatcagtaagttacagaggatggccaaatgcatatgcatacatgcttcatcttgcatttattccaggaatatttattaactgttgtcagtattctaagcagtagttttagaatagtgagagaaaaaaaatccctctctcatagaacatacagtctaatgagagagacagaaatactgagttttataagtaaaatataattgtgataagtattgaaaggaaaagtgctctgagagcagttaatgggagaggttgatctagtcaggaaagtcttccttgggaatgattaaactggtgttccccaggtgaaggaagtatacgaggaggaaagttgatctagcctgagagaccagcatgtgcaaaggcccagtgtcaggaagaaacatgggccttcaatgaactaagagcaagacagtgtggctggaggggagcctaaggccaggtcctgtgggtttcagaggccacatcagagacttggctctttattttaagagcagtggaaaagccattgaagtgttctaagtgatggggtgacatttccagatttgcttcttgaaaagatccctccaaatgcagaatggaaaatgggttagaagtgagtcagagcagatgttgggagaccagacaggaggctgcgatgggaatccaggtgatagtgtaaggtgaaatcaacaagaattgctagtaattggatattggcaaggactggagcaggggaagaattagctgtctaggaagacttccaagcctctgccataagtgcctggaaggatttggtgcccctcactgggatagggaataagggaagaagactcaggtttggaagggcaggggaagggagagcctgggaccagttttgaaggtaagattgacttgcctttgaagaattatccaagaagacgtattatataggcagttatttttacaggtcagaagctaaagaggtgtcctgactaaagttaaaaatgttgaactcgttttggaggtagtagttaaaggacaaatgtcgtcacatggatcgcaaggaaagagaggactttaagaaaggagatgcgactgccctatcatgctatatgttgttgtgatcccagtgaggtgtgaactagaaaactcaaagcatgcctcacacattgcctgccaatgccttacacattcctgtcttctgaacatgttctatatgctttcgctgagccattacccgtgctttcctaccttccaccacagcaaaggcagcaatctggcattttgtgtaaagagcagtagtgatgccactcacttgagggcagagtgcactgacgtggtcctcccttgctctcccaccaacccttggctgtttataccacctcccacctggcattgccagctcttaagtacgtgtatctctgccttatttcactggcatacctcactgaagtcacagactctgtcttaatcatttctgaatctctagcagctggcactgtgcctcagtcatagtaggtactccataaatatgtgctgaataaatgaattattgaaaaaatgaaccaaacaatctattaatcagtgtgaaggggcttcctaagtttacatttctaattatgaggatgaagtttatgatgaagtgtgaagtttatgatgaagcatggcttttctgaacagagacattgcaatatttaaaacagaggaacaaaactttgggtttgccttcaaatgtgacacagatctgaaagttcccaaagatcttattcttcggtattagcatcactggagatggaggaaaggtgggaaatagggaataataaaggaaacattctttctaattttttactaaacattggggtgaagatattagttaatactttaaattaacatagaacttttcttattataaactcaaaacttttcaaatatgtattaaatgattaattattcaattttaccttgaaatagcttatcatatattgctacagatcgctgcaagtattcaaatttcttatcaattcactacacatattaaaactcccactgaagcctgtaatgactttttttttctttttttataagatctgaaatgaaggttcagtattactctcttttacatcttggctggtatttgaaaattaaacatatattaaagacttgcttatactacctcaagtagtagcctagtaaaaaatgtttttggatgatcttttactgtcctcagcatctgaactttggattgttttggttcacagactgttggcgagagtgagagagggttgaagtcttagtggcacttcacatgcctctgtggattctctgagtgtctctctgggatgaaggtgacttccacccacaccatcttgcgtctgaagcactagttgtgtgagggcagctccattagacgagtacacaactcagttgccatcggctacttcttatcatgttttcatggggtgctacctgtttctttgtgtccccagtcgctgggtcagtgtgctggcgctgtccagttgtcctcagtgagagttctccccgggccatcctgccaatgtcacagtgccaatgaggtccctctgtaccgaacgttctgaagctccaggaggcctggcttccaaatgggttgtgtgttccaaagtctgtcccaccgtggtggaggctggcatcagaggattctaatggaggccaggggtggttggaggtatggcgagccccagtgtcccttcccacagggagtggtggatcttcctgagccactggaggtgacttctgtgcctggaccctcctcaccccatcagggttagggccagcgatggttgggggacaggaattctgatgagaggagtcagggatgtaggatgaacctggtcagctcctccttcaatggctgcttttgttcttccttctctctccccagcccacttccccttcttctttcaagttaagatttcttacttctccttggctcactgggaaactgttgtgtgatttctgcagcttccagtgtctgcccctcctcccttttcttctcacttctccctgctccttcgtttcttttcccttctctgttactccttccttctccccttctctctccttcttccacctcccactgccccatacatcccttttccttctactgagaaacctcctcctgagatttccattgtttttttaatttctgggtaagtatgagggaataaagtttaaaagaaggaaacaagtcttccttccgtgccttatttttccgttggactctatgaaaaaccaggcctcgcaccagtagctagaggaccaaggcctgcagccgacagcctgaccatgaaagcagcacccccctgcaggtggcacaagtgctgccggtctcactgtggccccactgttcccagcgggggaatctgtctgggtctgcagcaacctcaattcttgcctcctcagaagaaagaatttgaggggcagaaggagagactgaggcaaatgttacacagcaggagtgaaagtttattaaaaagctttgagcaggaatgaaaggaagtaaagtaaccttggaagaggggttactctctctgtgacttgggagatcaagtgtgcagtttgacctttgacttggggtcttacacgttggcatgctttccgggagattgcgtcccttctcccctgattcttcccttggggtgggctgtccgcatgccgggtggcctgccagcatttcggagggagcatgcacaatgtgtttactggagttctatgcatgctcacttaaggtgttcctcccttaccagtccagtattcctaggtcataccatacctgaactccgccattttgcctcttcatgcgcgtgcttgagcccactcacccaactcctgagatcttatcaggaagctgcttatcaccagtttcaggtttttctatctattaggagactgcctttccctggcactggctgacaccagttattattttagagaaacagtataacaactgcctgacctgagggtcgcctgacattcctggtggcagtgagagggacctctcctgccctgatcatgtctgcctgactacctactataacactaccactgcctattttgcatctggctctcttcattcctacctggcccttggagacagtggagctcaagactcttgaataaagaaaagcaacgtcataagtagaaaatagtcgatccttatctgcaaagggcagaagcactccagaatggaaattgtgtttttatactacaaaagtagtgtttagaggccatcttcccacctgaaggaggctagacagagtgaactctaggggaaggggcaatggggctggaggaggttttataagctagaaacaagaacggtcattcagttatatacagggagagaggagaggtagatacaagtccccaaaaccagaattatttccttccctcctttcccctacttctttttaaaatagtatttattcctttttgtcaatctatcatagtggtaagaattagagttggagtagaaagtcgcttttagccaggcatggtacctcacacctgtaatcccagcactttgggaagctgaggcaggaggaatgcttgagtccaggagttcaagtccagcctgggcaacaaaaaccctgtctctacaaataattagctaggcacagtagtgtgcacctgtggtcccagctacttgggaggctgaggtgggaggatcacttgagcaaccaggagttcaaggctagtgagccatgattgcaccactgcaccccagcctgggtgacagagcaagaccctgtctcaaaaagaaagaaaaaaaaagtcatttccagacattttagcagaggaagtgagaggagggaagttctggaagaaatggataacctgctgcattggtgcttctgagttacatcataatgagagaagttccgagactgagcacgcagaagatagggactgcctgtacctgagaaaggtggaaacacctaagaggggagtattaacttaagacgagaactgaggggacacttcctaactcagttcttcatttgtcttttttttttttttttttttttttgagacagagtttcgctcttgttgcccaggctggagtgcaatggtgcgatctcggctcaccgcaaactccgcctcccgggttcaagggattctcctgcctcagcctcctgagtagctgggactacaggcatgtgccaccacacctggttaattttgtatttttttagtagagatggggtttccccatgttggtcaggctggtctcgaactcctgacctgaggtgatccacccgcctcggcctcccaaagtgctgggattacaggcatgagccaccgcgcccagcctgttgtttttgttttgttttgtttttataaaaccctacctctcattttagactactcttgggagaaggaaataagtgatatttattgtcctttcatttggcagatatttattgagcaatttccgtgtattaagcactgttctaggcagcaggaatataacagtaaataaaacaagattccctcccttcatggggcttacagtccagtggtaggtataagttggtggcatagcagaaaaagtgaaggcggcattgtgaaacagtcctgcctgcagtgctgctagagagcagggcttggatcccatccctgatacttgtatatgacaacagcaaaagtggtacttaaaataatatgtcgtttcagtgaatttcctcaagagcttttctagtgcccttggttagccacattggcctccttttgctgcactgaggatccaaactccttcttaactggatgtctgttctctgtgcaggaagatggctctttcgagccttcttgtctcagctctaaatattccttgttcagacagattttgcctgatcatctatattaggctgttcttgcattgctgtacagaaatacctgagactgggaaatttataaagaaaggagatttaattggctcatggttctacagtgtacaggaggcatagcaccggcatctgcatctggggaggcctcaggaagcttcccatcatggcagaagctgaagggagagtaggcacatcacatggcaaaagcaggagcaagagagatggtggggagggggatgcgccacacacttttaaatgagcactgtcagcgggaggacagcatttagagcaaggcggtggtgctaaaccatcgattcgaaatccaccccgaggctgggcatggtggctcacgcctgtaataccaacacttcgggaggccatgcaggcggattgcttgattgctactcaggagttcaagaccagcctgggtaacatggtgaaaccctgtctctaccaaaaatacaaaaaattagtctggcgtggtggtgcacacctgtggtcccagctactcaggaggctgaggtgggagtatcacttgagcccaggaggcggaggttgcagggagccgtggttgcgccactgcactccagcctgggtgacagagcaaaacgaggccctttcgggggtggggaagaaagacgtgcacccctgagatccaatcacctcccaccaggccccacctccaacactgaggattacaatttaacatgagacttagaggggacacataaccaaactgtgtgatctaggatctataggtcctagagctgtccgtcaggtctgggatacactcctgccacttccgtcgccattcgatcacatctctgttttctccctagtaacgctcctgcccgcattagtgtgggcgctgggagggcaggaacctggcctgtctgatttacctttgcattgccagctcctaaaatgctgcctggcgttagttaagcacttgataaactaattaattttaaaatgctattttcagcattatttcctgctgcttctccgcatatactccacaccagccaaattaacctttctctttcctaggtctttctactgctgtgcccttgctcctaatacttcccttctccctccctcaagcccaacccaaagcatactttctcgctgctgacttgtcttaccattaaagaatgactttcccctcatacactctatagcagcggtccccaaccttttgggcatcagggaccagttttgtggaagacaattttccacagacctggcagggtgtggggatggtttcaggttgaaactgttccacctcagatcatcgggcattagttagattctcataaggagcatgcagcctagatccctcatgtgcacagttcagctagggttcgcagtcctatgagaatttaatgctgctgctgatctgacaggaggtggagctcaggctgtaacactcactcgcctgctgcccaccacctgctgtgtggcccagttcctaacaagccatggactgtaatacagtctgtggccccaggcttggggacccctgctctatagtacttcttttatatctcaatcatttggtacttactgtgtctatatatgttttttactccagatatactgtaaatacctagagtacagaaaatatgcttgttaaagttatccatagtgtctagcaaaatacgtgtgtgtgtgtgtgtgtgtgagagagagggagagagagagagagagagatggagtctcactctgttgcccaggctggagtgcactggtgtgtgcaacctccgcctcctgggttcaagtgattctcctgcctcagcctcccgagtagctgggactacagacgcctgccaccacacccagctaattttttgtatttttagtagagacagggtttcaccatgttggccaggctggtctcaaactcctgacctcaagtgatccacccaccttggcctcccaaagtgctgggattacaggcatgagccaccacacccggccgcaaaaatacatataactggcgctcggtaactgtttttggtttgttaatatgtgctctttctggcacatgggtcagaatccaatttcctgatgtggattgaccttacagtgttttggagacttaacatgtaagcttaatgaaaaagattcagttttgcagacttctttaaattttacttcaagagtactgctgtatgttaatattccatgtatgatatttcttgtagcattcttgagaaatttcctaaggagttaatgaagctgggtaattgccagggtagtatgaaattaaagcaaaacaaatatgagactgcaaatggaatgaactgtttaagctatatattactatattgggatcagatagagtagtaatgatgcaagaagtacatccaagctttattctggctaactagagggagctatttttcatttttaataaaagtcaaaaacagtttaagatcatatattatcttcaaaaggcttagtgtggctaatattagcatattgctttttacttcagttaacatgctcaagggccttggtctcttcagctaaaaatactcttcttttctatataaaataaagtccctggagcaaatttctttctttttttaacttttgtagagatgtggtctcactgtgttgcccaggcagtgtagtagcacaacggctcactgcagcctcaatctcctgggctcaggcaatcctcctgcctcaacctctcaagtagctggaactacaggcacgtgccaccaaactggctaatttcttcgtattttttagagacagggcttcactctgtcacctaggctggagtgcactggcgtgatcatagctcatcgtaacattgaactcctgagctcaggcagttctccacctcgggcccccaagtagctgggtttacaggtgtgagacaccatgcccagcctggagtagatttctttattgaaaatttggtaaatggagaaaaattaattttatgcagtgattctattccgagatagggcaggtggaaaggaatgggccagtcaactctaaaacaaaggaaggctccagactccccccttgacacaggccacaagacctagagatagtagctttgctggcactgctctggattgaagaagggaaacacacttgaatgtgtcttgctgtttaaagcattttatgaacttatgtctttagacatttctagaactgaaattgaaccacacgattatttttattgtatcacatgagagatgattttggttttataattttcctcttttccacccatgaaccccaagcttatttaatagggtcatgtggggaagggctctgaaaaggttgtttaattttccctgggttctggcagctgacactgttctgaaaaaaacaagtggaggatgaagggaaacaaacaagaaggtcatatttggagaccctcggcctgcttattaaagcgcactgtgcacttggatcagtggagctgcagtaggagtgttgcccgagccaacatacatacctacaggtgtgacaaccttgtataacatcatcatcacagacatcatctgtgcccctctcccttgaaatagacgtcacttcaacagaagcagtggaattagcagtttagaacttccccacttcctgtccactgcagctgtatgtcagtctccacttacctgggcactatagtggaaaagtaactgataatcagtttagagggagattttgaaggattctgagctgatgctggaagcttatggaaggtgtcgtgctaaatactatctccaatactccattttatttaatcctcacaactctgtgaggttggaatttatgatcctgcttttaaagatgaggaaaccaaagcccaaagttttgaacacaggtgtctgtctatccaatgctcagagttttttagctacataaggcttctacctttactatggaatttggattttcaggcagttacacacagtatagagctttggagcctaatgatggtttcagacatgatatatatttgaaactctaaccaatcatcatttgtccatattgtactgcaataacacaatccctgattctgggtaatttaaagaaccaagatttatttcttacggttgtagaggctgagaagcctaagatcaaggggcccacatctggcgggaaccttcctgccgcatcatctcatggtagaaggcagaagggcgagaaagaaagagaaagagaatgtgcatgagcacaaatggggctgaaacttgcttttataacatatcctctctcaagataacccactcctatcagaacatgaatccatccatgagggcagcatgacctagtcaccggttattaggctccacctctcaacactgttgcatttgggattaagtttgtaacacatgtactttgggggacatattcaaatcatagcactaatcatgtatcatctttcataagaattatcctttaaaataagtgagatggctgggcatcttggttcacacctgtaatcccaaaactttaggaggctgaggtgggcagattgcttgagctcaggagttcaagaccagcctagggaacatggcaaaaccctaactctacaaaaaatacaaaaattagccaggtgtggtggcatgtgtctgtggccccagctactcaggaggctgtggtaggaggatccacctgagcccagggaagttgaggccacagtgagccgagatcgcacctgcactccagcctgggcaacagagcaagaccctgtctcaaaaaaataaaataggtgagagagacatacccaatatatgaacaacacaaatgggaaataaagtgttcttagaaaaactggaactttggttcatattttaaattatttctccgtatctgtttttcttcctttctgatatcatgacagtatttaagagctcaattgttgaagacgtaagccccggtccctaacattgtcgttaatgagcttcatgttgttgagtgagtgagccttcaattcccttctacagaatgagggaattagcccagaccagcagtttgtaaacagtgtgttctcaggaccctttacgctctcaaagcattgagaatcctaacgagcttttctttatgtaagttatatctattgatatttacccatattagaaattaaaacaacttttctaaaatattgatttatcaatttattttaaaagaaacataaagccatcacatattataaataacataaaacatgaatatttttatgaaaaagaacttttttcaaaaaaagtgagaagaatggcattgttttgcctgtttgcaaattcctttaatatggcattctctcttctgcttcttacatttagtctgttgtgatgggttgttttgggggaggtatatgaaaaaaatttagcctcacccagatacttagttggaaaaaagaggatctgacagactccttgaaagggttttggggacaccctggcgtcctcagaccacaatttgagaaccactggactagatgacctttaaaacccaacccagactctaattccgcctggctttggggaagcctcacttcaaggtctggatctgtttcctcattcaagaaagacttaatctatatatcagatgccggaaaatcaaagctagatagaacatagtccctaaaagggctcatagtctagtagcaaaatacttacagagcctaccacgtgccatttactctgcttgatgcttttgtatgaatcatcttatttacagaccaattacattttaaagcagatattattgtcactctttcataaatgatgcagctgccttggcagagagagatccaataaattacctaagatcacatcacactgagagatgggcctcaggtctgagcctaggactcccctcacagtgcgtgctgttttcgttatactgcatttctcttctctgcagaataatggagatggaagtgtcttacaggtcccctctaccttcctatggttatgattatatagtgctaccataccagtgagataacttattctcatagctttgagaatgtgtggttagaatgtgttcaaaaaagagtagtacagtattataaatgaatatcctaatcacttcccctaaagtgagaataaattctctttatttttactatttagctaaaagaccagcctttcgccagtcagtagtaaatattgaaactatctataccatggtggctactgtacagaatcaaaagaaatgaaacatataacttccatcctctagaattctatagtgtagctggtgagttactggacaagtaagacctaaatgcataaatggtggcccaacaaggtgaagacaaatgacggatgacaggtgttatggatgggcactcgagtttaaaaagcaggtggcagctactcaggaggctgaggcaggagaacccctcgaatcttggaggcagaggttgcagtgagctgagattgcgccattgcactccagcctggacaacaagagcgaaactccatctcaaaaaaaaaagcaggtgactcttctggactacagtggtcaaggaaagctgccgggcaaaactgtgtagcttgaaaggccatgctgtcctcccagagggttagaattggatgggtatagtgaagtgggtggtacaatccaggcgtgagatgctgtacctgagcaggaaaggggatgggtctctgcaatccagagttgaagctgtcaaaccacagggcccaaagaactgcaggcttaagcttcagagggagggggctgtgtctctccccctctccttttgttccctcaccatttctgcttcccttccttctctccatgactggtcccccactctttctcctctcatttttctgtttctgcttgaccctttctctttcccttccttttgctctatagcccttccttatctcatgtagagtgagtgggacagtatcattttttattgaataaaaatgctacatcccattgtcttgcctttgaaattaggcatgctaagacttttacagacttttccagagagagaacacagactggacaaagtttttttgtttgttttttttgttggttttggtggtgttttttttttttgttttttttttttttttttttgagacggagtctcgctctgtcgcccaggctggagtgcagtggcgggatctcggctcactgcaagctccgcctcccgggttcacgccattatcctgcctcagcctcccaagtagctgggactacaggcgcccgccactatgcccggctaattttttgtatttttagtagagacggggtttcaccgtttttagccgggatggtctcgatctcctgacctcgtgatccgcccgcctcggcctcccaaagtgctgggattacaggcgtgagccaccgcgcccggccgtttttgttgttttttaaacttcagtatgaacttctgtgctcttttctttgagatggttgctcctaaattgaaaactttttttttgcagctccatcagtcttggtcttaaaatcagtgaaatttcagttgcagaaattactcagaggaatgacttttctttactattattatttttccctgactgcttgtcttagtttgttagtgccactgttcgcaaagtacgtgagacttagtaatgtataaacaatagaaatttattttcttacagtcctagaggctgagaagttcaagttgcaggtgccagcaggttcaatgtgtggtaagggctgccatctccttccaagatggcaccttgttgctgcttctaccagaggaaaagaacaccttgtcctcatgtggcagaaaggacagaagggccaaactcacccccctcaaccccttttataaaggccctaagcccatccatgagggctctgctcttactacttgatctcctcctacaggaggtgattgtagcgggtgattgagaagtggagcctcctacaggcctcacctcttactagcacattgacaattaagtgacaatatatgaattttgagggacacactcaaaccataccactgctgttccttttccttgttgcagaaaacattgctgccaagtggctgcccctgccccctttccttccctctcacattctgccaccctccagttctttgtacaaagcatcacagtgagggagggcttggactgcacttgcctttctttcacaagattgccaagagcccagtgctttactcaagaatcccagggagggttgagcatggtggctcacgcctgtaatcccagcactttgggaagccgaggtggggcggatcacctgaggtcaggagttcgagaccagcctggccaacatgcggaaaccccatctctacagaaaaaaaaaaaatacaaaaattagccgggcaaggtggcgcacacctgtaatcccagctacttagaaggctgaggcaggagaatcacttgaacccgggaggcacaggttgcagtgagccgagattgtgccacagcactccagcctgggcgatagagcgagactccctctaaaaaaaaaaaaaaaaaaaaaaaagagagagagagagagagaatcacagggagctaacacttttaaggtgttgtccttaacactcactgcttctaagcaatgaacacaaaaaaccaacaaatcatttatcattaaagagaaactgcaccgctacttagttctgattagaggaagttcacagaatttcgaagtagaggagaaggttagaaaatgtcacttttacccctcatctatcttgagaaaaggaatttcatacaagtggattaaaaggataagaaatatttagactatacattgaataatcattgtattcatgccattttgtgtgcatgtgtagtgtatgtttcagtgttgatgttttgtgggaaatgaatgtcactggtggtatagtggcctggtggtgttacacttatttcacccggtaatgaatgatgcagttgttcataatgtcctgaacaaaatctgctttgtgacagatgttcagaatcagtaataagaaacgacacgtggctaatctctaataaattaattgagttggacatcacccttcttttctattcaggcagatgatgtatcagcttttagatgattccaatagaagaaactacctttcctacagaattgtggcatccaaaaatgttttctagggtataatttgattaatgaatttaatagtgtctatgataacagagtctctggagctttagctgttttcttcttccaaagtaagaagatagaaagcaagtgtgcttactttacgggatcatagacttcaagatagaaaaaggaatcagtgatcctataaagtgagcacacctgctttctaccttccttgtccccaccccaacacattcgcacactgcaaaatcacatctgcccatgtgagccactctctgctgtcgccttggaggcacaattgtgcacccagattttatcagagtaaacgtccttctctacaccatcctgcgccagcttctggttactggagtaatgcgacttttgctttaggaagaatatgactccatgaatgtgactccaagaatatgaccccatgagttgttggttaatacaaatcttttattgtagtaggaaaaagtaatttcctgtcaccctttacccaaacaatagtctggtaacgtttctaaattagcatttaactattgaatttcaagaatgtgaacaaagttatcaagtaaaggaatcctacctttttgcagccccattttataagtgaggaaacgatagtcatttattgaaagtaagcagtgtctttacgtttatacccaaaatgtccctgtatgaagcaataatatctcaccaaaggttttctgtcttctgtttaaccatctgagatctgcatatcattaaattttcagaaatttagtattaaaatctatagcctagcctacaaatacgaggcttgagagtgaaaaaaatacttcactagagaattttttcttttttttttttttttgagacaggttcttactcctgtcgtccaggctgaagtgcagtggccctatcatggctcaccgcgtcctcagcttcctgggctcaggtgatcctctcagctcagcctcccaagtagctgggactataaggacccacaccctactaatttttacattattaatagagacggagtcctactatgttgcccaggctgatcttgaacccctggactcaagtgatctgtctgcctcagcctcccaaagtgctgggattacaggcatgagccactgcacctggcattgagaatgttgttcttctgtattctttctatgggtgtagcaactctggcagtaagtcttaacatagcatttattaagtgatcgtgagtctccaagcttgctgttgggtgttttaaccttaatacagcagttaggagaccagaatctgagaccagacagcctggattcaaatcctagaatgctgttttcagtgaggtttgactgcctttccaaaaaatttctcggaataagcaaatcattatagtctagtcgacacttagagcctgttcttctgtcaaagccatatataaactgtcttagcaaagcctggaatttaaaaatttagtttactaaatcttaaaatatccagtgatatttggtactatcagaatggcctctggtagtaggctcttctagtaagaattaagtgccaggcgtattcatggatttccctgtaccaaggcccctagtatctgtatagataatgtccagtaaactatttttcctttttaatctcctatagtttgctctttgtctttttttagtgtgtggtgtctagacacatatctcagagacagatgtgcctcacatgatacaataagcagtcctgaaaagttgcttagaaatcacttttttaagtgaattgtattggtactggtctgcctggggaaattcacagttcaaggaatactaagattaaacctttggtcaagcaaaacatttttgtaatgtgatttatcacagatacccccaattttaactttgttcgaaatctgaattttacagtggattatggctacatgttttctctcctgcactaaagacatatatccttgtaccctgaagaaactgctgactatataagttattttaaaaactactgtataaaggaatgtttttaagaatactatatataggatttatggtttaaaaaaattttttccagacttttaggactatcattggtaaattacagttgccatataacaaggccccttctagatttttacattgtcacatgttattctgatctgtgtatcatgaattaaagtcagtggatatttgatgttgaagtccaagggcagttgtatgaaaacatatctcttctggaacatcaactaaggtgataaaatactgaattagcttttaactattactagaattgaccatgcagaattaagagagaatggatgaatgttgtggagaccaatgggacattagtctctctaacacattagaccagtaaggcagaccacaatagcattctcaggtgatttctagaccttatggctgagttctaccctggttataaataaactctgcaagtactataaaaatgaacaggtgtcagaactgcaactagcaaaatggtccttctacagatacatcttgtttgtcagttgaggaaaaattaataagactatgaaaaaaattaacagtaaactggaataatttgaatgttcaaattggggtcatttttattctaattgaggtttgaaagaaaaaacctgtttttctgcatgctgtttttaggaatataataagcctgagacatggaccatctgttatactgaccatgtaacaagatgttagatttattcagacacgatgcagtttgcagtaccagatacaaggtctggtctttcaggtcagctgtgattacgtctgtgcaccacaccagtcaagttatttaactctctgttgcgagattgacactattgctgcctacattctgacaatgtaacacacacacattcctagaggcagtttactaaactaataaatagtatgttaacaaacatgtttggctgggcgcgatgactcacgcctgtaatcccagcactttgggaggccgaggcaggcggatcacaaggtcagaagactgagaccatcctagctaacacagtgaaaccccgtctctactaaaaatacaaaaaaaattagccaggcattgtggcgggcgcctgtagtcccaggtcccggctactcgggaggctgaggcaggagaatggcgtgaacccaggaggcggagtttgcagtgagccgagatcgtgccactgcactccagcctgggcgatagagcgagactctgtctcaaaaaaaaaaaaaaaaaaaaaacaaaacaaaacaaaacaaaacaaaaaaaaaaacgtgttcattgagaggcctcctcttgagattccagagacttcaaccctgattgagcaaaacaaaacaacctttgttttgtttatatctacaaagaaaagaacagctgaaagtctatgaaatctgttgatttacctgttcctgtttattgccagatatttatttatcactcacataattgttgacctatgcaccatacaaaaatcagtcatagaaagatatgcaccccactatccagaagagtacacagaccttcagaatgatgagagctatgtagagcttaatccaggggctaatgtgaagtatttcaaaggcttctttttgtagttccttcttaaataaagtgatgtcttacatacctaaaaggtatttagttgacaaggtacagttcagtgcagtattactaaaggatcttacgtttaaaaatgtcattgtacttttcataggttcccataggtggaagagttgggaagcttttgtgctttggcatttataaaatcggctgatgtgaaaggattacatttattaaatgtgagttcgtggaaagagaaaagagtgataaaggtagttctatttttcttcccctttagggtaccaaaactatatcagaaaggtctttgaggaactgtttctgagtgactttttgaaatcacagtttattaaagaatttttaccccgcatgctttccaaaagcattgagcatagcttgcaataaaaacacagatacggtaaaactaaaaactattcaagacacaaaaaggcaaaaagcaagtagctaaaacagtaagacagacattttgtatattataaaagaagaatgaatcacctgaatgctaacagaagttgcattattaaacacaaatattagtttcttaatcgatctcaaagtataggctgggtgcggtggcttacacttgtaatctcagcactttgggaggcgaagcggggggcagatcacctgaggtcaggagttcgagaccagcctggccaacatggggaaaccccatctctactaaaagtacaaaaattagccaggcatggtggcacgcgcctgtaatcccaactacttgagaggctgaggtggaagaatcgcttgaaccagggaggcgaaggttgcagtgagccgagatcgtgccactgcactctagcctgggtgacagagcgagactccatcaaaaataaataaataaataaataaagttataacaggtaggattatgggttgtagagattcttgtttttctaattttcaaaacatattttagttgtgataaaaaaatacacataacaaaatttgccttctaaccctttttacgtgtacagttcagtagtagtattacattgttgtgcaaccagtctccagaactttttcatcttgcaaaactaaaactgtactcactgaactaattctgcattcccacctacccccagcccctggtaaccaccgttttacttactgtttctatgagtgtgactactttagatagctcatataagtgaaatcatgcagtatttgtctttttctgacaggcgtattccatttagcataatatgaagcttcatccatggtgtagcatatgtcagaatttccttttttaagactcaataatgtcccactgtatacatataccacatgtttatccatttatctgtcagtgaacacttgggttgcttctatcttttgcctattgtgaataatgctgctatgaacaacaaatatcccctcgatggcctgctttcacttcctgcagagattcattaagtagaagttagcatcaagaaagaagctttttccaggcctaaagttcaaggtccatgtatcacatgagtcttaataagaatgatgagtaacaaaaaatggaagtcatcttcagaagccatcttgcaaagatgcagtttttctgcaaagggctatttcttggcagagttcagtggaggcataatgttaaataatgtctgcaaaatgcactgctttggaggcctgcctatgtgacttcctagtggtctagccgaatttcaggggtaacaccttgggaaaccattaaggagttgagtggtaagcatgcccctaaaactagcccctaaaactcaaaggtgaactcaactgagcccttgacaagatcaaggcaacctcagaatagaggttgctgatgagaacctggaatgagtgggaagttcaaaccatcccacagatttagacagtggaagatggaagagccttgcttgtgttctcactgtggtggatggccaccgcatgaagtgtccgtgaaggtgtttagactcaaacttagagctcccaagttctacaggcattcatagcctggaatgctttgtagtttgggcttgtcaaatatctacttctgtcaaaatacaacatgaatatgattctacgattacatttaatttggggcaataatttctcaaatcaactacttctagaaggacttccagatacctgaatggtaagccagtacctgcaaaacaagagtgttccttctgacagccattggctgataggctcaatggactagtctcataatgtgaaatagggcaacacggttgacataatgatggtaagatagcatgggtgggtcctgtagataaaacagttgttcagattgtttaggtgctcagttaaaagcaggcagccagcacccaagtcatttaaattttgaaagccctactcacactcggattttaatgggctttttctaattcccactattcttacatgaattaaaccccatttctaaccccaaattctctccaaagcaaggaaaaaatattgtctaactctcattattcactttagtcccaagtgaatcagatttggagaagttagataattttaacttaatattttaaaactatttccaaatgatcatatgattttagtttagtacaatggatgttctaagagaagaccagatgaagttatagctacaaataaaattggcttcctcatttgagaaaatttcaagtttacaaaactattgaagtgttttttaaaaaatattttagaactattattcattttaacccaacctctggaatgggtctctagacccactttggctgctgtgtttatttatccaaaagtaaagtttttattctgttcctgcaaataagaagatatttagaaatggctgacatgtgcaagtatattagtactcacggttcttaagtagagactagcagctgttagttactcaggtctgatgttcactatatggctgttttctacatcagtaatctattaccacatttgtattagtccactgttcaagggtgacttttggtcatggatttacttttgttttacagaagcattatatgagcttgcttctctttcccaaagtagtcagtatatttttacattattctattcaaaatgaggtaaaattataacatgaataaaagcacgtagcaaagagtatattctgtaaagcgatattgcaaaattaataccaatattatgccaaaagattgtccttatttcaacttccttgcatgtacatttctatacatttaatttaattgtgcaaaaaaatgcacaattgcacaaaaaattgtgcaaaaatgatgtgatataaaatgcattttcaagatgacctattttcttgaaatttcaagctatattgagtgctcagtactcttcatttagagaattcgatttcatgcaatggaaacagcaatggaatttgaaaacacaaaatgttaccacataatggggagcaaagaataaacaaatgagtgactgtaataacaaaacactggaggtactgaatagagttgtatgactctggaaaaaagggccaaaaatcattactcagcttggcacacagagaaaggagaaggcctgagttttgaagtaaaaaacctgggtttggatcctggcttcacatgtacctaaaattccttatcatgaatatgagaataattcctcacagggcattttgagatttagcaagaagaaatttagctctggtgggtggcgggtaatccataaatgatagctatggagactgtagaggttatttagttaatacctcacaaagagttaaaaagagatgctgttcatactgcagtggcaaaaaaaatgctttctttaggtgtgttgtcacacattaacgttctaatctgttttcaagtggaatctgaggtctctctttaatctttaatctgtgtgtggatgttttgttaacacatctgataacagaaacactctgacatggaggtgttccgttctcatgttctactctaggcaagttatttctaccttctgaaaacctacattatctctggtttttccctagatttgccatcttctatatagaaataatttaaaataataacataatactgtattcctgaaaacttattttaagacttgactccttcttggtttgtttcaaccaaatgatcattggtctcttaagaagcattgtattctctccatgatttccaaataaagctaacatgtgtgaagtataatttaagagcttgcatatacttagttcatacatccctgcaagattggaattattattagtattccaattttatatgtgataagcctgagatctcagatggtacatgatcacaaagctaccaggtcacatgctaccagatcacaaagccagcatgctgaaaggctgatgggctgtgcccctctaggacctgctggggcaaagccagggatgcccccttaaggaatcaaatgcatatgagcacatttttcaagccgcacagtatgaaatgcgtgttgtgttgtgctccacagacatcctgattttccaatttgctttacccatgtcacaatctaaatcagtctttctctctcaaaaattttgtagaacttcctaaatgcaatatctaattttgtggccacttgataatcttactttttataaattgccagtattttccttaattatcatcatcatatgcaaatctgtatgttttcatagcctttaactgttctcttttcttttttcctttccttctctctatcattcattcatgagaaatgcttagcaaagattgacacatagcacttgtttatcatattctttttgacatttacaaaagttagacatggatcctgtcttgaagaagtttgcagttaccaatcaaaatgatggaactaaactgagctttttaaatttttctaaacacacagaaattctgcatttaaaaaaaaaagtcttaaatatatagccaagctcaaaagaaatgtttttaaaaggtgcaaaactaggaaattcataggcagggtgctttaaagcagaactaatgccacagatggcccactgactattgaatacagatatgcgcttgaggagtgggtattagaacacagacagagaaaggtgacaggaagctagactccaacaaggccagcacctgaaatagagctccctgcataaatccagggcttggcaaagatttcgctgtctactaacaaggacaataaaactaaaccaaccagccagcatggcaaggaagctgaaagaaataagaaacaaaaacctgcaccacatcaagtgtggagtctaaatttaaactacatgagtcttgcaaaaagtgtttaagctgagaaattagcataaaaactgctccagaacaagtaaaatgcttatacccatggcagtagcaaatgctaaaactctgtagtgtcccatccacaagccagaacccatgggattcacctagaagacaatacatgccaaaacaatacatgttagatatgcatattagcaccccccaaatttgaataaaacatctgaaagaaactataaaataaatgtttaaatatctagatatgtaaaggaaaaatacctatggaaaagaacagaaatgtttgagagagaattgaatagagcatttctcagctcctcaacatgaaaaatactgccattaaaattaaaacactatagatattaaatggtagattatatggaaaagagatctgagaaaatcacctaggaatgcagtacagagagataaaaagtgagaagatatgaaagagaggctaatgtggaagacatgaggagaaggtccaacatactgctaaatggagtttaaaaaggaaaaataacaggaacaggatggggtgatatttgaagggacaatggctaaaaacattttagaactgaaggaatacttacgtatgcaagttgaataaggacattgagtcctgaacaggagaattaaaaatcagtctgcacctcagtacatcataatgaaactgcaggcaatcatataaatagagaaaaaaattttaaagctaccaaagagaaaaatgcaggctaccttcaggagaatgacaattagactaacaggaaatttcccaaaagcaacaattaaggcccaggtatagttgaatactatctgcaaagtactgtcgtaaatcacctgtcaagctagaaatccatagctttttaaactatcatccaggaatgaagataaaataaagacattttcagacaaattgagaccaaaagatgtgagacatgaactttggtttggtttggtttggtttggtttggttttgggatggagtctcactctgtcacccaggctagagtgcaatggcagattttggctcactattactccacctcctggttcaagtgattcttccacctcaccctcctgagtagctgggattacaggcacctgccatcatgcccaactagtttttctatttttgtagagatggtgtttcaccatgttggccaggctggtcttgaacacctgacctcaggtgatctgcctgcctcggtctcccaaagtgctaggattacaagcatgagccactgcacccagcccctgaacatttatcaactaatcactgctgaaagaattactaaaatacattcttcaataagtaagaaactgaactcaggagtaaagtgcaagaagtgatggtggtcagagaaacactggggaaatctaagcagacctggagtgtgtgtgtatgagagaaactagatttaacaatgataacttaaggtgtaaaaacagcatgtatagcttctaaatccagtagagccatagcagagaggggatatcgggggaacccgcccccagtatttcaatgtaggttctttctattttccataagtgttggccagctgagaaataaagagacagtataaagagaggaattttacagctgggccactgggggtggcatcacatatcggtaggatcatgatgcccacctgagcctcaaaaccagcaagttttattaagggtttcaaaaggggagggggtgtaagaacaggtgtaggtacaaagatcacatgcttcaaagggcaaaaagcagaactactaataaggggctaacaaagatcacatgcttctgagggaacaggacaaagtgcaaaaagcagaactaccaataagggtacaacaaagatcacaaggcaaagggcaaaagcagaactactgataagggtctatgttcagcagtgcatgtattgccttgataaacatcttaaacaacagaaaacaaggtttgagagcagagaaccggtttgaccacaaatttaccagggcagagtttttccccatcctagtaagcctgagggtactgcaggagaccagggcgtatctcagtgcttatctcaaccgcataagacatacattcccagagcggccatttatagacctccccccaggaatgcattccttccccagggtattaatattaatattccttgctaggaaaagaatttagtgatatatttcctacttgcacgtctgtttataggctctctgcaagaagaaaaatatggctttttttgcccgacgccgcaggcagtcagaccttttggttgtcttcccttgttccctaaaaatcgctgttattctgttctttttcaaggtgcactgatttcatattgttcaaacacacgttttacaatcaatttgtacagttaacacaattttcaccatggtcctgaggtgacatacatcctcagcttacaaagataacaggattaagagattaaagacaggcttaagaaattataaaagtagtgtttgggaactgataaatgtccatattaaaatgaaatcttcacaatttatgttcctctgccacggctccagccagtccctccgttcggggtccctgacttccagcaacagggggctaaaaagctaggtcaatccaatgaaaggaagagaaggaggaagaagggaaagaggaaggaaagtaagttaaaatggtagagaacatccaaacttgtcagtaatcatgataactaaaaacagattaaactgagttattaaaatacagagactctccgatttcttaatccagccttttctgtttagaaaatatgtgtgaaatataattacgtgggaagtttgaaacaaagggatcaaaagaaaggtggacagcacacctgacaagttctaaagagagcaagaaaaagaggcagagagaaagaaaaacaatgtgaagatcagatatttttaaggcaaaaaattattaggaataaaaatggtgttactcagtgcgagaaggaaaaaatgggtaaaattggtaaagatatgaatagtcaaatcaccaaagaagacacccaaatgatgagtaaacatttgaaaaaatgctgaacctactggtgatgatggaaatggaaataaaagcaaccatgtactatccattcaacctcccatcaaatagaaaaaaaatgaaattggataatggcaatcattggtggggatgtgaagtaagggcacgctcatgctctgctggttggaatgaaagcaggtgacatgtgcaaatctatgactcagaagttctgttttcattctgtatcctgtagaaacgacaaggatattccttgggcatcatttgtgatagcaataaagagcaaacaacccaagtgtccatcagtagtggaatggataagtaaattgctatacattcaaacaaatgaagctcgaagcagttaaaatgaattaacttagttacctgtatcaaaatagatacatctcaaagttactgttcaataaaaataagttgcagaaggatgtgcatatctaatttcaaatttacataaaacaaagcagtactgtatgctgtttttgtagatacatacatgtgtagtgaaatagacacatctgagaggaaatgataatcacccagactgggtggttctcttcttgaaagaggaagagatggatgggattggggaagaaggcagagtgggccttaactctgccatttttaatttttaaaaatccggtgcacatattgcaaaaatagtagcatttgtttatactgttaattctggatggtagatttggaagctcatgctattagcatgtgtgtgtttaaaatatttccttaatttaaaatggcttctatcttactgggggagaggaaagacatacagtaatgcagagaacatgtgctgtgtttcgttatgggttccttataattggcattcagagttgagttgcaagagatttctgccaattgaggggagccccagaatccatcctgcaaaagagatccccacattgctttcctgcagacgctgcctgctttcagtcaccctttaatggatccactatccagacctcgttttctgtttctttggcctttggcaagtcctttcccatttttcaccaatagtgtctctttcactttttacggtctggtcaccatgaaccagtagttatccagggccttacaaaaggtttattactttgaaggaaaacatctaaaaaaaatagtgatgccttgcttacttctcaagaaaagagaaaataatgacttctgtttttagataacatggatttttatggaagcatttggatagtggtgtgagggtattgtttggttgtgtgtgtggaagtatttgtatatgttgtgccaaactcccttgtcattttttctctttatcagaaaaattccatttgacgttctcaccttttaaagtattttttaatttcccttttaaaacatgttgctgtaaatagttaataacatgctccatgacctctgtaaggaaggcccatggagaaataagattggtcatccccatcctatgttcgtagcatctagcccagtcctttcctataagtgctggatatctgtggctgaaaaggaacaagagtcagatcacagcagcttctctgctttgtggatggtctcactgtaacacactaaaatcctcatcagtcagtattactcttgacataaaatgaaatcatggcatactttaaaagggttggtttcagtgctcctgacacattctcacagggtacaagtaaacggcccagcagtattggtctagaagcaatttaccagtcactatgaaaagcatctaacttgtctttaaaatacacatctgctccatgttgaagccaaaaggagaattctgactcagatctcttattaagctgcctcaggctgccagtctgggtttgataatgaatcttgcattctcagacattttcttcttttcctttgcagagagaagatgcatcagtctgccatgtatgaactatgccaggggatgcaccaaatcagccttcagttcgttcgactgcagctcacctttgaagaatacaccatcatgaaagttttgctgctactaagcacaagtaaattgatgcccattctggcactgtttctatattaccagatcatcttccccatagggcagtaggctatttattgtattcaggtagttggtaccaaaacaaaaacaaaccaaacagaaacactgaagaaatgggaggaaggctttgacctttgatgaactaagttacttgcaaagtatgaagctttgggcatgtgaaagagcataccccaacattccttcatccatccaaccactcagtgtttataaagtatctgttatgtgtatggtaggattgggcaattcaggaaacacaagggttaatgaagcacagtctttatcctcatggagtttatactctaagcaaagttcaaagatttttttttttttttttgagatgaagtcttgctctgttgcccaggccagagtgcagtggcatgatcttggctcactgcaacctccacctcccaggttcaagcgattctcctgcctcggcctcccgagtagctgggattacaggcatgcaccaccatacccagctaatttttgtatttttagtagagatgggctttcaccatgttggccaggctggtctcgaactccggtgatccaccagcctcagggtcccaaagtgctgagattataggcgtgagccaccacgcctggccaaagatatctttaatacatatggaaagtaattatttactatgatggaggtaaggaatgtaatggtggttcaaagaagggaagagcacattcagttctggggatctgggagggacatgtgatgcagctggatcttggagggttttgcaagggtcgtaggttggatagaaggtgtgagatggcattgccatgagcatcagtaatgagtgtggacctgtggggaagtctatataggcagtaacaacacttagcgggaaggggttgttttgccttccaatcctttatttacgtattcatttattttttaaaggtgcatcaagttatgttggatggaggagttgtgggtaataagattggggtgtggattagaccaaaatattcaatgtccattgaagaaatctgaacttcattaggtgggcagaagagggcaatgctgaaggcttttgagcagtggggtgacaggatcaaagctgtattgtatggctttataagggtctctctggcggaatagattcaagaggagagagacaggataggagagaggcagagacagagaacttagcccaactggaagcacagagacctgctgggagcctgtggaaataatggggggtattaccatgactggtagtatgatagacaggagcaagtggagtccagaaacattgtagagttggccttggcagctgcctaggaagggaaatgaaagtgctgtgggtcagagtgacacaggttttgagcgcagagaaatgactagccacagtagtgatgccattaataggaatatgttaacatcaggacttggagcagattgtgtggcgtgtaaaatgagtgctgttttggataggttaattttttgataccaactctgagtcttgatagaaacagccaaaagatggggagaactggggactgggactgtgaagacaggtatgagcatggagatataaatttgaaattatccttatagaaaattgtagtataattccaatggtgagtggggttaccatcatccagagagagccagtggagctgtgttacaggagggtggcagaagctgcagggacagagacaactgtcagagaggtggagaaactgggagagtgtacggtattggaagccacgaggtgagagttttcaaaaggcatgtgactaacagcatggcctccacagagaaagttgataaccccgacagaaggccactggagttgaccattaggcatcgtgcaggtgccagcatgccagggacttgcaaattgatgagaagctgttttgggcttctggaaccaagtatgggaggagagaagttagtggcataaagtgccagaggagacaacagaggacaggattagctttggcaaggatgtctggcagtttaactcttgacaacagcacaggcattttccaacagaggggaaagaatttgaggaagctcccatcagatgagggcgagacccagaaagatgacaggagacaatgtggagaggaaaactctgagccgtatgaaatggccactgaggaaactgagaaatgttccagatgttaagagcctgcaaggatgccatggcaggtggtatggacttcagaggagagagtgcctagtgacaacctggagtatccagtctgtgcccagcccttgccatgggcccctgaaacagaggtgtgggagaaggggcagtgatcagtaaagtcatttggagaaaagggccaagactagccaaggggctcaggatttccgaatgcgtatgaagagctgttgtttccagcagagaggactgggtctacggaaagtaagctggaatcaggtagtgatcaaagcaggaagaggggacacagtggtgacatgggtaacatcctgctttacctgtgtttggcaccttgcaatttgcaaagtgtttttccatatattatctaatttaatgcttaaaattaccctgggagattgatagccctattctaaagttgacaaaacggaggcacgtaagtgtgatatgttgagtatcctctatgagctaggactaaaaccgatggcttggaactttacctccagtgtcattcctgctcccctaagagcagtcaccaagaggctgaaaggcaggcaatggcaggtggcacacaatggcagcagcgagggcagagtgtccaaaaggcaaaatcgcagactccatagcagagggggcaaaccggcagtcctggtagggaggtggggccagcagttcacagctgtgttttatttggccagcacaggtttttggggttgcttttggccttttgttttattttcattgaattcaattgcccggggcagggcatgttctctctagtttgccacaggccccaccattcctcactaattacacccagccccatctcccgctgctcttgtgtttacaacccctcacctgcagggttgtcctcctgctccactcttcaccaaggtttctgttgttcctgatttattctttctggagtataactttggaactataatctttaaattcactgaaaatgattttactcctctgccaagctagattattaaccattactggttagaaaaatatgtttaaaattatgacaaatggatgatagaatgtaaatgaaacattttttaaagtgcttgtgatactaattcttcatgaatgttgactactcaatctaaattcatgtcttatccttttacatctctttacatattcactcagctcgtaatagattctgataccattttgaagctacttgaattaatttattagcccccaagtagcttggtactttgaattctgattttttttcaatgcagaagaagcaaaataaaaaggtaggaaaaaacataggtaaagcattttatgaaccataaaaactgcaggcgttagtaagcttgttttgctaatctatgatagaacacatgaaaatttttcatctcaggaatgtcagatgcacacctgatatccagtgtatcaaagtttttcgggactgacatcagaggctctcatgttcttgaggaaagcagacagacttctaccccagttgtctctttgctcttctccagattttggatgatttccagcagctctgctgcatttaataagtaaattcagaaactctgggcagaactccaaaatttgaggttttgcttaagttctctttatttgtgggtttgtttcaacttctaaaaaatctggctgggaaactggtacaatatatttcagttacagcaataatatataagtaatactgtttgacaagttgttgtaatttttagaatttttgatctacaactatcagaaatataaatttggttaatcttagatgtaccaaatggtattgaaatatgatagtgaaacttatttattctaccactagttaacttttcatgtatagggtgatgtccatataagtatctatactgaaaaactaaacatttactttgtacagttttataacttaaatgctaatctgtgggtgggaagtgtaagatatttgaaaacttttcctatcttttagaaggttttaagttaacattaaaattttggtagaaattggattttactattaacatcctggttattactgttctttttgtttttttacttttaaaataaagttttcaggagaaaaaaatactatttgttatataatggatagcatttaacatttaatatgaatgtcaaatattttaaaccacaactaatactgtggcagcctcaggaatttgtgcagttgctattagggatttatttttcccctcacaaaaatagactcaaataaatgacaaatcaaaagtctcaacaattaaactcaagaagattattaacataatagtagaagttaatttgcaagataatccatatctttttgtagggtaacagggtttatgtggaaacagcagtatgcctggcttccagggttgcacacaatactcagcaccatctccaagtctccaagtgctgatgaccaaagtaaataattatttacaccagttatgggaaattagcaaataaataggtaattaagaagtgaaagtaagagcagtttcaaaatcagaatgttaatatcccaaggtgaattttcattaggtctttatcacctagaaataaaattctagttgattttcttattcagtgttaaggcataaacataactattggctataagtggaacaaaaatgcttaaactctgtcctaaacctggacttcatttcttaataaagtacgttcacaaatgtcctgggacctgcttctcagcgggtcacagaagcacttgataagcttacaagtcctgaatttcaaagtattccttttaagtgaatttttttaaaacatacgaaagctagccaccacataaaaggaaagaagaaaatattgtccttagttttctaccttatcaaagatacagatgaacatggttcattctctttgaaagttttaaattttgccttgcgtgcagagccactgttgttgttcccccctcacacgcataaaccagtgtacgtgaatcctaacttgccaatacctcagagataggaaaatatattttgatgtacagacgctttatgggcttgtgctggaaggtcacgtgccttagtggtcatgagatcctggtgcaaagtggatagaaagtgcttctttgtatgcagcgtcctccccttcgtagatggccagttcccccgaatgtctttaatatctgaacttgagaatgaggatgttgatttctaattctagccccaacctagattgtctatggctcttcagttatcctggaaaatcaaaatatattttactatcttgaagtattggcaagttaggattcataaacacttggatgaccagccacaaggcaatgtggcattgtggttaagaggcaggctttggaaacagacagacctaagttgaataccaccccttctctgcctttttttattgtgtccatgggcaagtgattcagcctccagtgttcagtttcctcatctgtaaaatgagaatgatataacagttatgtcataatattggtgtcagggttaagtgaactagtctgtgcaaagtgtatgataagacacatctgataaatagttgttctttgtgtatgtatgtgtacaagtatttgccagtagacagctgccatatttattcataaatgcaattaattgagatttagtatctaacctcaaaatcagtatatgactttacctgccaagatgctaaagttgttttccatcctggaaatttacatgtctgttttccttaacacagttccaaaggatggcctcaaaagccaggctgcatttgaagaaatgaggacaaattacatcaaagaactgaggaagatggtaactaagtgtcccaacaattctgggcagagctggcagaggttctaccaactgaccaagctgctggactccatgcatgacgtgagtagagcccctccttggttcctaagtgaaggatcagcaaccacatacacactgctgaccaaaggaaacagagactgagagttttcagggtgtcatgctagacctctgttgactccattaaggatatcgccatgtccaaggggctgaagaagagacccagagccagggaatgagacatagggtttattgggtacttacatacaggatgggccaagagtagtgccagaaaaccactcccatttataaaaagcattcaggttatatagcattttcgcctagcaacctccatgtaacccatgacaaagggcctcgatcccctggacgacctgcattccaaagaatgggccagggattcggatgtcctctatagattaggagtgaatctccaggttggccactctcagattccttagcttagaactccgaacacatattcttcttaaaccatagggttattctcagggtatgcttgagttattgctgtcaggtgcatctgccatacacagggctttgggaagaatcagagtaaatcatctgatagaaagcagcaagagttaaaaactgattaaggaattttttttttttcaaataacctttggaacaaacctcatttgcagcagagagtatgccctggaccagggaaggccctcagatttgctacaggtgtcagattgagtttcacatttttgcttgcaatttaggaaatgtttggttaataaaaatgtttgctttaacattgcataaatagtgtccatcttctacaactgttaatctaataacccaatctttcaaaaacattattagtggttcagggccagcctggatcatctcaatctttgccaacttttgagtcttatattcattattcttcataggagtcacctttcttgtcttgtgtcaatacagaaaggagattctaagcttgtttctaatttaatcaattatagatatagccgaggtggttttagcagtttctacaaaatattgatttggataacttgctttgtatgtcatttaaaatatgcttcttgttttattttgcaagcagcttctccaattccggctcaaacgatgttgtacgcagtcatgctaatttagttcttcatatttgtgaagtttccatactttcttttggagaatttattgcccaagttcatcctgtaagatctgagtaggaaactcttttaaaaatatttttctattaaggaaaatgttgacaggcatcattgatgaccagtattataatggtattattatggaaataatggtccatcttttagaaattccattatgccagcggaatgttatctctctgtggtaactaatggcataaggttgattgataaaagaatgtcactttccagtgttttacactgagaccctgtgcatatcatttacctctgctttatctgaacttttcatatgacagaagtcaaattcccacaaggcgaactcagtgataaatagttttgctaattgtcagtggcttaaagagtgtgacttagtggaaaatcttagaaataagagatgatggcaagcaaggctttggggaacacagcaaattatgctcttcatgactcacacaaaaggaaatgcagggaactggagcaaagtcttcccactccttttatgttgaaaccacagatcatctacatgagaacacatagcagatttactttcgtctgttaatttcattgaaaggccctctgagtagagaatagaatggaggttttgtggttctttcgtaagttctcttatttgtacagttaggcacaagtgcaatatcaaaattcatgtgattatagatgaaacattctgaaacaatttccatgtaatgaggcttacaacagaagttaaacttggtttttcaaaagccctttggaattgacttttcttaagcagcatagcacaatggaaacactaaggcctcacctagtggtccatgggtcaaaacctcctttgctagtttttttttttcccccaccagcacagtgcttggcatagataggaactcaatgaatagttttttgaacggctgtatcataaatgctgattttatgcaaagtttcccaaagtaaattagtgtctgtgggggtttcttaattgaggtataactgatatagaataaactgaacaaatttaaagtccacaattttataagttttgacttctatgcacacctgtgaaattatcaccacaatcaagatagcgaatatatctatcaccccagaagttttctccagccttccttcaatctttccacctacactccttctcctcaattactttctatatcgctctgtgaatcgagattagtttgcattttctggtgttacatataaatacaacaatgcagtatgtagtcttttttggtctggcttccttcacttagcatagtaacgttgagattcactcattccatttcatatataaataatttgtcgtgtttttcttattgcaaagtagtttcccattgtatggattttcccccaattaatttgtgcagtcacctattgatggttgtttgggttgttaccagcttggaggctattacaaataaagccatgctgaacctttatgtacaagtctttgtacagacatatactttctcctttcttggatgaatgccttgtagtagaatacctgggtaatatggcaggtatattttcatattttaagaaactgccaaatggttttccaaaatggttgaacaatttactgttcccacaagaagcatatgaggttcagattgctccatacccttgccaactcttggcgtggttagtcggtttactttcagccattctaatagctgcatagtggtatcttactgtggttttcacttacgaaaagattgatgatggtgaacatcttttcatatgctcatttatctttatatcttctttggtgaagtgcctgttcaactctttggctcatttttcataattggataatttgttttctgactgctgagttttgagggttctttatattttctggatacaaatccagatatatgactgtaagtattttctcccagcgtggctgatcttttcattctcttagcaatgtcttttgaagagcaggagtttgtaattttaacgaagtccagttgatgattgttttctgtatgggtcgtgctttcagggctgtatctgagaagccctagtgtaagccagtgtcatggagcttttctctatgtttccttctagcattactatccttcactgatagcctgtgtcttggaaatcattttttcatggtctttattttgagaacttttggttgtttcaaatggaagggtagtttcagttcatctcactccaccttggctggaagaagaataccacttctttagaatcattagaatcattttaattctaaaagctttattttgaaatatcaaaaatgtttgatcttaaagggggcctgacagaagcatcttgaatactctatttatattcctattccaaacagagcattgaaaaatgcattttaagtctagagggacctttctaacattcacacttactcagacttgagactgcctacagctttttcattagagtaaattagtgaatcaacagttgtggaattttcttcaagggaacaaagaactacacaatgcgctggctctatactcagagcctagttctgatcaccttgtggaaaaaagagcatttgtttctaagggtcacacacataagaacctttgactgtagatcaaagttctgcttaaaccatgtgtgtagtatgccagctctcaggacacatccacgccgctctcaggacacacatggatttcttccacatggtacacatatgtgctggaataatggtcccaaggtgggtgaaaggaacattctctgaaagaacaggttgatagttgagtgtttgaatcagttaacaactttaatgaatcataagtcctctgaatgtcaatctttccccaaaaaaatatttcaaacaaagcagctgtggtaaggatactaggagtaaatgtagttttgcattgtaaatgtttaggtgtcatatgtaaagcatatagaatccttactctactagaaagaattgacaataataattttttagctcttactaaggatagcaatttcctatgagggaaagaagcttatttctaatgaatttattgctaacttctattcattcttagagagatcaaggactatttatgttatggtaattgtgtagaacagtaagtaacaaagatgatattaatagtacctcttgatgcaaaaattgcccttttcctattaaacatatgttgtaattttatgtcagtatacacacttagtaaaaatgtgcctcctgcctagcagtatagacagtgctgcagaggataacaataaataagatagcaacctgacccctgataaatagtgtgcatagtgtgccagccctcaggacacatgcacacaactttcgggacatacatggatttcttccacatggtacgcatatgtgttggtagaatggtaaataagcttagtttacagaggtgactggagcataatgcaaggtagaaagtaatcaggtattcaaaccagttccctggatggtgggacccttgagagcatgtatgtttatatactgatctgctggtgagcccttgccacattcccaggaccagtgggccaatgcaaacagaaagtctgtccttagtaatcgatagaggacgatattcatctcattcaacaaatacttgagtgtctaaaagtgccaggcagtgtcataggagggagacacccccagacagggcagccagacagcacctggaggtcacagggcagcatgctgggacctccgaggaggtggagttgtgggctcactgacacttattctacattggtaccaagccttgtgaagaaagtggaggagctgtgctgggcaggagtcatggaaaacttccaagggggcatcagaggatccttatttaatggaagaagaaacagccccacagaatgatttcttaaggttcctagatagctggtggcagccagaacttccttgactcactgctgagtgctccggacgctgccattatgaggagagaacacttgtggctgatagcagctgctcgtttttaggctgggctgcatttcagagatcagaaaaccatcatataggaatgttagggacagctgcaccaccctccggcgctccagatttgtttgcatcttccctggcacgttctggaattcatcgtttctgtgaggtgcagggttacatcttgaaggcagtcaaccttgttttgtattaaaacatcatgtgtgtgtagcagatcccaaaacaaaatgttagttggcctcaacatgagctgagcaggccttggcttggaggcgtttgcttctgtgtacgaccattagacctggatgggaacctacccctggggtgggtgggggtcagtgtgtcactcagatgctcttctctgcacgacagaaggaaggcctctgaggatcccattgctgaatagctgctttctgtgtctccaggggccatgctagaagctgacgtggctcttctctagccaggctctgggagccatggcttccctgctccaagaggggcaaggtgggtagtgtgaggaacagaaatctggtggtacagaaaatactacatgtacacactggggagatgtcattctttaggtcaaaagggcattaagtatcattgacatggctgggtgcagtggctcccagctgtaatcccagtactttgggaggtggaggtgggcagatcacttgaggtgaggagttagagaccagcccagccaacatggtgaaaccccatctctactaaaaatacaaaattagccgggtgtggtgatgcgtgcctgtagtaccagctacttgggaggctgaggtgagaagattgtttgagcccaggaggcagaggctgcagtgagacaagattgcaccactgcactccagcctggatgacagagcaatacctgtctcaaataaaaaaaacaaaaaacaaaaaacagtcagtgacacaataaccacaaatgacatactgctacaagcagcagagactgttcacaaattattattatttttattttttattttactttaagttctgggatacatgtgcagaatgtgctggtttgttatgtaggtatacatgtgccatggtggtttgctgcacctatcaacccatcatctaggttttaagccccacatgcattaggtgtttgtcctaatgctctccctccccttgtccctgacctccaaataggccccggtttgtgttgtgcccctccctgtgtccatgtgtttttattgttcacctcccacttatgagtgagaacatgtagtgtttgcttttctgttcctgtattagtttgctgagaatgatggcttccagcttcatccatgtccctgcaaaggacatgaactcatccttttttatagctgtgtagtattcgatggtgtttatgtgccacattttctttacccagcctatcaatgatgggcatttgggttggttccaagtctttgctgtcgtaaatagtgttgcaataaatatacgtgtgcatgcatctttatggtagaatgatttataatcctttgggtatatacccagtaatgggattgctgagtcaaatggtatttctggttctagattcttgaggaatcaccacactgtcttccacaatggttgaactaaattacattcccaccaacagtgtaaaagcattcctatttctccacagcctcaccagcatttattgtttcctgactttttaataattgccattctgactggcgtgagatggtatctcatcgtggtttttatttgcatttctctaatgagcagtgatgatgagctttttttcatgtttgctggctgcataaatgtcttttgagaagggtctttgcccactttttgatggggtttttggttttttttcttgtaaatttgtttaagttccttgtagattctggatattagacctttgtcagatgggtagattgcaaaaattttctcccattctgtaggtcacctgttcagtctgataatagtttctattgatgtgcagaagctctttagcgtgattaaatctcatttgtcaattttggcttttgttgccattgctttaggtgttttactcatgaaatctttgcccatgcctatgtcctgcaaggtattgcctaggttttcttctagggtttttatggttttaggttttacgtttaagtctttaatccatcttgagttgatttttgtataaggtgtaaggaaggggtccagtttcagttttctgcatatgcctagccagttttcctagcaccatttactaaatagggaatcctttccccattgcttgtttttgtcaggttggtcaaaagatggttgtagatgtgcagtgttatttctgaggtttctgttctgttccattggtctatatatctgttttggtaccagtaccatgctgttttggttactgtagccttgtagtatagtttgaattcaggcagcataatgcctccaacttttttcttttttcttagtattgtcttggctatacgggctcttttttggttccatatgaaatttaaattagttttttctaattctgcaaagacagtcaatggtagcttaatgggaataacactgaatctataaattattttggggagtatggccattttcacaatattggttcttcctatccatgagcatggaatgtttttccgtttgtttgtgtcctctcttattttcttgagcagtggtttgtagttctccttgaagatgtccttcacatcccttgtaagatgtattcctaggtattttattctctttgtagcagttgtaaatgggagttcattcatgatttggctctttgcttgcctattgttggtgtatggcaatgcttgtgatttttgcacatttattttatatcctgagactttgctgaagttgcttatcagcttaaggagattttggctgagatgatggggttttctaaatatagaatcatgtcatctgcaaacagtgacaatttgacttcctcacttcctatttgaataccctttatatctttctcttgccagaacttccagtactatgtagaataggagtggtgagagagggcatccttgtcttgtgccagttttcaaagggaatccttccagcttttgcccattcagtatgatattggctgtgggtttgtcataaatagttcttattattttgagatatgttccatcaatacctagtttattgagagtttttaacatgaagggatgttgaattttatcgaaggccttttctgcatctattgggataatcatgtggtttttgtctttggttctgtttatgtgatggattatgtttattgatttgtgtatgtcgaaccagccttgcatcccagggatgaagccaacttgatcgtggtggataagctttttgatgtactgctggattcggtttgctagtattttattgaggattttcacatcgatgttcctcagggatatttgcctgaagttttctttttttgttgtgtctctgccaggttttggtatcaggatgatgctggcctcataaaaatgagttacagaggattccctctttttctattgtttgaaatagtttcagaaggaatggtactagctcctctttgtacctcccgtagaattcggctgtgaatccgtctagtcctgggctttttttggttggtaggctattaattactgcctcaatttcagaactagttattggtctattcagggattcaatatagtcttgagaaggtatatgtgtccaggaatgtatccatttcttctagattttctagtttatttgtatagaggtgtttatagtattctctgatggtagtttgtatttttgtgggatcagtggtgatgtcccctttattattttttattcacacattattttgagagagtcatagttcatataattagtgggtgcttttgcatctcgctgtggtcctggtaatttccctcaggatcacactagaggggacttagagggagacacaaacctactttaaacctcatatggaagaatggaagctgcacatttggctatgtccaccatttacttggatagcccactcacttcatattttattctgtcttatatctttccactcaggcaaagtttctcctcaggaaatgttctgaggccaaaatagaagcctgccatggaaatgagaccactgcggacaacagaaagagtgtggcctctggtgctaggttgccctttctttcagccatcttggtgctttacttcagtttttggctttcggtttcttcaactgtaaggcagtaataatacccatcttgtaggaagtttggggaagtgaatgaaataacacaagaaccaagacatctaccacataacaggcactgaacaaatgttcaccctctcttcctgttgctcaggtgacaatgaaataaggctacttgcttctatgtctgtaataaagtacccagagctggtagtaccatgaatgtgtatgtaagagacatcgagagatcgagattcaaagccacattctctctcaccaagctaaactatttattataattgttagcggtgttatgctgctttcttctttgacaaggccatgactaagaaggctctaagtaaaggaagaatcatttattccatagtcagctaactggtagcaaagccttctcttccaagacaccaagggagaggggaggacataaattatgcaaaaaaaaaaaaaaaaaaaaccaaaccaaaacacaaaaaaacaaacaaatctcactctttttgaaaaggacatcttcataggtgtaaagatttcaaattaaatgaataactgacatgggagatcttactcattgcctagtgggtaatggaacaattgctaagggcttacattatctctataatgattactaagggcttacagtgagaggtggtggagccaagtttgaattcctaaagtagataagagctggcaattacatttacaaatttcttctttcacaaggatagcctagttcagaatacattgctctggctgacttgtgccaatggatgcttattttcatataaagcatctttatatttgtataattgggaaaatgcaacaaatataattaataatgggtggtaaataggaaataataggtgaaaatgtgatttcagcgtgaaggaaaagcatggcctagatgccttgaggtgtggtatggggaggtctggacaagccaaggactggtgtctgttacatgcctgcagctggggccgtggagtctgactggaatatgtaactccgcgtagaggtagaaagggcatccttatgtgttccttcttcggtcaccacattaatggtttaagggcagcatcaatcagtggccatggttgtatctctcggagctcccctagggtttggaataggttcatagagcgagaggcagcagaattgctcagtgactgtttctctcaaacttgttggaaagaggcttttcataaccagaacgctacattaaaaaagagatttttcagtgtccagttgttattcactctgtgaaacgagccatctctgtcagttacccttctaaacagcctctacgggtacgtgcaaagaaagggctactgagtggccctgcttcccggagggagggcctggcttttgggccgtgagtctactggcaggggaggcacacgtggtagcctctaccatgccaggcacagcacaggcactatggatacaacaaccacatgagagacctggggcctatgtcctctgtgaggacagagcttgcagtctgatggggaatatagacacctaaactggattgaaaacccggcatgaaaggtggtgtgatacggagtgtcaggaccacgggtggagtatctggaaagggaagtggcagggtagagaaggggccatggcatgaggcaagggaaaagactgcttagctgcgacccaaaagtcaagtcggggtttgccacatagatggaagctattctaagccaaaggagttaacatcccaagggagggagaagcatgctgattttgagaaatagagaatgtccttgtatccaagagagccatgggacgaatggagagaaagaggagggagacagtgatggaatccgtaagccaggtctaggaagctgttgaggcattttcaccacatctgtagagaatctggagctgatctgtccaacgccatttccaccgtcgtgtggggctctttacatttaaattaagtaaaatggaaaatgagtctcctgaacacactagctgcatttcaggtgccccacagccacatgtggctagttgccaccattctgtttataatgacaacagaaagctgtgcagaaggttgtgctgaatggtgctgtctgacagattctagaggatccaggaggggcaggaggcagcgtcccagttgggatgctggtgctgtggttcaggtgagagctggtagagccaagctggggcaggagcaccaagagaggttcaggtggtggaatgatgactcctggtgatgaaagggatggggaggttgagagaggagagagcaagtcaaagagaactccccagagttggaagtagatagctgggcaaggtagcacctgcccagaggagggggctcagggccaggagatctgggaggggggatgaagagcttgtttaggacgtacaggatttgaaagacctttaggacattctggaggaaatagcaggtagacactgagttctgtggatcaaggtgaggaaggcagcctgctgctgcagatgtgggaggcggcagcatgtgagtggtcactgaagctgggagtggatggaactgcccagctgttggtgcagctcaagaagagggcacagaacggaagagggtccagaggaaacactgtggtcaaatggggaggtggctgcaaaaagtctgggaaagcgctgctgctaaaggaagaaaaggaggcagaatggggacattcaggacaagccagaaaagagagtgtgtgccccattttgccaacgaggggcctgaggggaagaagctgcagaaaggtcagttagcaaatggcctgaacaactttcagtagccatagcaactgggaggtggttgtgaagaatagtggatcgactcaaggcatggtaatgctcacggggtttccagtatctatattagaagccacaaagcaaacagggacagcagtccattttttttttttaatattgagagtgttgtccagcaaagctccttagtaaaattgccttaataaatagaagagaatgatggctctttctgttaaatggtgggatgtatgtaagtgagcagttcgaatgtggttgagagaatatacaatgtctttgtgtttatatgtttaagcctggctaagaaatcccatcagcttaacaagcctatctttgtaaataatcccgaaactctattccagaccatggctggctttattatgtactgtatgcatatatgtgtatatatgtgaggatgtgtatatatcacacatgtgaagagttcagcatcaaaggcagctatgaggcttctgagctgatcttcttttttaagtcatgatttagttcaatgatgcaggtcctgaacccttcctctcccatcactttcacattacaccttaattatgattgttcatttccacttgcagccacagaacctctatcttcttcagtctttcgtgcttgatcatagctttcgtggctgacttaatgcaaaacctgggtaatatacttacctctttcaagaaggttaatgttttcccagcggctggtttttagacaattcatagtgcttaccaacagttggtcaacagccaggcaacattttaagatgcaattgtactatgttttacagaaatgagaagggggaatgtccacataggagtttatgcttttttattattttatttttaattgtaaaatacacaagcataaaatgtaccatgttaaccgtttttcagtgtacagtgtgggtgttgagtacattcacattgttgtgcaaccaatttccagagctctttgtcctgcaaaactaaaactcccccttcccctctttctgtctctatgaatttgactactgggagtagctcatgtgaggagacatacagtatttgtctttttatgactggctcatttcacttagcataatgtcctccaagttcgtccatgttgcagcagatgtcagagttactccctttataaggctgaataatatttcattgtatgtatacaccacactgtgtttgcctgctaatctgtcaagagacatttgggttgccaccttttgcctattgtgaatagtgctgctatgaacatggatgtataaatatctctttgagactctgctttcaattcttttaggaatattcccagaaactggattgctggatcatataattctgcatttatttttttgaggaaacaccgaacttttccacagcagatacaccatttttcattgctaacaacagtgaacaaggattctaatttctccacatccttgtgatcacttgttattttctgggatttctttttagtgctcatcttcatgcttgtgaagtggtaactcattgtagttttgatttgcatttccctgattagtgatgttgaatacctttccaggcgctaatggccatttgtaagtcttctttgaagaaacgtctttcaagtctttgccccattttatcaattttttgtttttttgttgttgagctgtaggagttctttatatattctgtacattggccccttatccaatctatgatttgcaaatattttctcccattctctgtttttgtttgttttcacttcgtttgttttggtgccaagatcgtctttctcttatgaatttataatgacaacagaaaatcgtctgtttcttttaatccttaactggcaaaaattaaaagcggtgtttgatctcagtttatttaaagaagggaaaaaagtatttttcttatgatcaccagctcctcgtgcttcatcattgatatttcacaggttacaaacccatagaacatgtgcctgtgttcacagctagttttgaagacttataagcaagtaattttctgtaagaacactgcagaaaaactaggatcttgcctcattatgggaggaaatcaggcattccattcccacctgactgcgagatttgtgctgccacagggtgatctttctggaaaaaacaaaaattttagggagaaaaaaaccactgaaggtcctacaggctatgtttctagaagatcacatctaaatcaaacctgacacacaggaatcttttcctgatctgaaatatatctaggggagattttgggaaactatcttattgtctaacacctgtgtcaataaatcccccgctcctatgcagctcaaatccctcttcttacaatataataataactgtgtaatacctgggatttacatagtgtctttctttctaagtcctgtcattaaatccttctaatgtttccatgaggtgaggatgagtaaatattactatttaaacttaatcaccctcctgtcttaattcctttctctataaaaagaaaataatagtaatgcttacttggattatttttatcctttttatagagaaaggaattaagatggggtgattaaatgcattttcacgggctcataaatgaggcaggagggaaagaagcacctgagggagccatcaggtggctcctgtgggtggcagcccagccctccacctgggtagctccattgctgataggttaggtgtcactctgggcttatccataaagtgggcatctccagggccaagtgtcatgggggtgtggccttgcagtcccactcttggcataatattctgctgctcccatctggaaattcttaataaactttgaacgagggaccccttatgttcattttgcacagggccccaccaattacgcagttacgcagcctggcctaggcataatataatctgtttaagattgtgtttgtcagaattcagcctgcagtacagcttgcaatgggtagaacaccttgcaggtgtggccagggaagaagacagcagagataggaaagacaaaaagtttgggtggagcagtacataagaattcaggcagacaagggactcactgatatgctataaaaaaggaacttttaaacccagggcctaatttgatacaaaaaggaaatagtgaaggaatttcataaggagtgagacactcttaagcaatagagaaatgttattgtcagtgtcattataaaatagaggagatagttttaaatgattgatatttaaaaggctaggaagatgccaattgaccaattaagtttatcaaggtcataaagggactagaaagtatatgtgggttaaactgcagacagtcaatactcatcattctcagattttgtatttacaacttcacctactcactaaaatgtatttgtagccctaaaatcaatgctcagggcacttttgcaggcattcccagatgtgcagagcagtgaaaaatgcctgtcaccaatgtgcatgttcctggcaaggtcaaacaaggtgactctgctctcttgtttcagctctaatgccgtaaatactcatcctttttgaggtctactgcatgccatgtttttttttgcatttttgtgcattttgttggtgagtctactgttgagatggcccacaagcatagagccccagtgctgtctatgttcctaagtgcaagaaaactatgacgtggcttatggagaaaatatgtgtgttaaagaagcatccttcaggcctgagttacagtgctattggccatgagttcaatgttagggaattggcagtatacattaaataagatgtctttaaacagaaacatgcataaaacaaggttatatattggtcatttgttgaaaaagttgcgaccagcaatgtaaccgtaataggttattgcctgatgcacacagcaagtcaatacaccaagacactggattgcagcagagaggtttaatcagagtcacaccaaaagaggagatgggaggaaacctcaaatccatctccccaggagtttggggcaggggtttttaagggcttgggagtgggcggaagtgtggaggtcattgattggtcgaagagtacagggggaagtcgctgaacagggagatgaagaagccatattctcatgctgatcctgttcctctgtgggagtcttcaaaccggttgcaggaattcagggtctgaaaaacatcttaagccaggggtgtccagtcttttggcttccctgggccacattggaagaagaattgtcttgggctgcacataaaatacactaacactagcgacagctgatgagcttaaaaaaaaaaaaaaaaacaaaaaaaaacgcaaaaaagtctcatcatgttttaagaaagtttatgaatttgtgttgggccgcattcaaagccgtcctgggccacatacagcccgtgggccatgggttggacaggacaggcttgtcttaagcgatccttaaacaaaagcctttgattctagtgtcaagagatcctgtctgtatggtcagtatctaatgctatgtgacttttagcaagtaggaagtgggccaaagtgcagcacgattaatacttaattataactatatttctttccagaacctggcgtgcaattcttgtcaaccctacaggggcagctcagcagcttgtgggaacctaaccctgtatttcccctaggagcaattgttcagtattcgttaaatcagtgttcaggtgactttgtaagacagttagctaccatggatatcgaggatcgactgtgaatatatgtaacccccaggaaatgtaggcttaaagggaaatgactcctgaaggaacagccaaaaatgtgagacatgtatgacagaggttgtctatttgaatgacaaattctggaacctttaagttgcatgacgtcttcggttacctagccttatgcccataggtgctaggattctttctaaggcgtttcctaaaggctagaagaatctgtatggtaagaggaaagccagatctaagtaccaccatatcacttaatttggagacctcttttccccaacgttttagtagttttgaaaactactaaatcctaaataagatggagacattgtatacttgatttatatattttaacaaacaaaacctgttcgttcaaaagctgttattgaatctgtgagatgccttccaatccatgggtcagcgaacttctgtagtgcgccacgtagtaactagtttaggctctgtgggccacacaatcttggttacagctactcagctgtgccactgtagcatgacagcagtcacaggatatatgtgaatgaatgaatgagtgtggccgcattctaaacaatttcataacatatgaacatgtcacaaaatattattctttggattttttttcagtcatttaaaagtataaaaaacacaaacatggaaaaaacttaaaagcatgaggccagatttgacctgcaactgtagtttgccagaccgtttgctttttgtggcatcatagaatcaagagaagagaacagtccttatctattgccttgagacaccttgatctcacctgttcttacctaaggctgcctctggccactagggtctgccccttattgcttggtgttccttttttggggagattgaagtaaggatttaactgcctaatctagattaaacctaatgttaaagttggtaacatataaacacaagtcagctcagatttttactttgctcagcatagtgtacatttgcaagaaggatctaggaaatattgaaaacaagattaggaaaagttcatacttctatatacagtaacatgccaatgcatttcaaacaccaccctttcattacatttcctttgttcagcaaggttctaattacccctttatctgtaagctccactttcttcttttccattgtgtcatttttctctgtgtttttcacatgtacaatagaccttattctcaagaaggcagagctgtggtctagaatgaggcttttaatacaaggaaacgttaaggtggaaattaaataaaattaaacaaaaaaattagaagtaaattgagcccatcttgcttagcacagcatccaaaaacatgatttaaggatttaatattcacccctgaccagagatcagtgattggtgttaaatttgttataaaaatggggatgaagaacaaattaaaacacagtctcaataacaatcagatgctaatggatgggggccgggatgagttttcagaaatgaccttgatttctcatgagacactgtagcacctactccacccctccaccctcccatcccagccagcccattcctgggcaggcactggacagacccagactgcctgagcctgcaccagtctagactctggaaccagccctgggaggctgcatgggacaaccctgcctctgtcactccatcagcgtcactaagcttccctctaaggtccccaaatgcctctcacgtgcctagcatttagctgctgcaccgagcatgctcactgacaaacttttggccaagaagagccttttggtctctcttggtcagatctaggagggcttcaggactctccaaaactcacccactcagagagcctgccaggaacactcagctgagcgatggcattgtggagcctgggttttcagaagggagcccatagtgagtggtagcataaccttgttaaggttgtattttccttagatatagaaacaaatcaaatgctgctaaattggtaagggatggagttttcatatcacgtcacattttgctgagccgtaaccagacagggaaaaagcagagccacatggctcaggggcccatctgggcacaagcgggcagcttccctttcagcctgcactgggagcaggttgggggtttagaatctgttttttcaaaattaatatttattgtggaatatacatagctcacagtttaccattttatccattttaagtgtacaattcagtggtattaggtccattcacatagttgtgcaaccatcaccaccatccatcacagaaattatgccccttaaacactaacttcctttcccctactcctggtaagcactattctgctttgtttctatgaatttggctactctaggtacctcatgtaagtggaatcatatagtatttgttcttttttatctggctcatttcacttagttaatgtttttgaggttcatggtgctgtagcatgtatcagaatttcatttctttttgaggctgaataatagctctctgtgtatgccacatttcgttaatctgtggatggaccttttgagctgttttcacctttcggaattgtgaataatgctgctgtgaacatattttgttttttttttgtttttttgttttttttgtttttttttttgagatggagttttgctcttgttgcccaggctggagtgcagtggcgcaatctcggctcactgcaacctccgcctcccgggttcaagcgattctcctacctcagcttcccgagtaactgggattacaggcatccatcaccacacccggctaattttttgtatttttagtagagactgggtttcaccatgttggccaggctggtctcaaattcctgatctcaggtggtccacccacctcagcctcccaaagtgctaggattacaggcgtgggccccatgcccagctgtgaacacttatgtacaaatatctatttgagcacttgctttcagttcttttgggtatatgcccagaagtggaatggtgtgtcatatggcaattctctgtttaatctctttaggaactgtcatactgtcctccaaagcactgcaccattatacattttcaccagtgacatgcaaatgttccaatttctctatatccttgtcaacacttgttattttccactgttttttgaatgcctgttatttcccccttttttgataatagccatcctaatgggtgtgaaatgctatctcattgcagttttagttttgatttgcatttctctgatgactggagatgtcaagcatctcttcttgtatcttgtaaagatacatttgtgtatcttctttggagaaatggctttggcaagtcctttatcaatttttttattcagtttggtttgttgttgagttgtagttgttctttatctattctgaatattaacctcttttcagatatatgactgaaaatatcttctcccattctttggcttgccttttaactgtcttgatggtggccttggatgcacagtttttaattttgatctacttgtatttatcttttttcctttcattgcctatgtttttggtgccatatccaagaataacactgttttgtttcagataaaggccaaacttcttatataatcactgcaggtcattttcccatattcacaaggctatttctggaacacctggactttataaagacttgccagtcatttgtgtccagtgaaactactagcgttggagtatttatagttgagttgatgtatcttttgccctaaccccaacatatcgctgactaaaattttgatctttgaaaataaagtttccaatatcccccgccccaatgctcattttaggcaaaagctcactccaattaggtagacattctggagtcaacagataacatataagaaatgagcacgctattgaagtcatgtgggacctactttagagaggctgtatcattcaggcttcatcaccacttaagtgactgtgtaacctcagaacagcagcagtggccccagatgtgcagcaaggaggagactctccctgcaaggccttctgagaagccttcctttgcgagcagggagagcggggagtggccgctggcctgccccagcaatgacttgtgagggtagtatggaaaaggcagattgagccccacggcctcattgtcagagcgagccaagtgccatcagttgccctgtgaccttgccaggctcctcttccaccctgacagctgtggcccatcaggctggaaaaatcatgctgggcatctgctaaacttctgagatcccagcagatgaattctgtacagaatgaaaagtcaatgcataaatcttcctctgatttctaacaatgcgggactcttattgctgattgtaattagggttcttgcctctccatctagcctgggatctaccaggaaaggccagtgggcatcagcattgagacagcaggccaggccatcattgcatttgactcattgcaatgaagtcactcatgctgacaagtaaaggtagagctttggcttcgtcgctatgaccaccctccccactccgaccccagggtctctaaccacagtgagcagagaatggggctcctagcacccctggcatggcacgcggatggagtcatgttaaaactcagcataaacaggctgaaggaaaccggagtctagggaaagatggaaaggagttagcttcatgtattgagttttgcaatattggtgccacaaaatgaagatgctcatttaggttgcccagtttttgttttggctcaatgaataaaactagcaacatgctaccctaaaaaatactgttgaaatgagtcattcccaagcactgggagcttggaataagtcagagaaacccaggagcgagaatccgggcaagagtagcttggaatccctttagccctcagcccacaccagggttgcacagcagaaacatgaaggggccacttctgggagccgtggggaataagacaggtgattcctccatcaaggagcttgcaggccgctgtttaaggagctgcaccgtaaataggacaggttaaacccataaagatgtggacagcaggttaaagagaaagtggggtcaccaggctccaaggctaattgttaagtaaatgagaaaaacaaaaaagtgtcatctgcgaggtgagagtccagaaagaactccttcaggctgggccccaggaaggcctgcggggaagaggtgactgcagagaaagaactggggaagcagctgctgcccacgagcatgacattttccaaaaatgattccatgccaagtgagtgtctgaggaaattgctggggcatccccgggagagctgtgcccacagtcattctgaagtaatttgctttgaaaggtggcctttgggatggtctggcttttccccccattccaaaactgacacatcctgatgaactgaactcttcttggtggtttcatgctttgcagtgggaatagtagtttgggttccaactagaaacggtgcttatttagagatgcacagcctggctcctaccctgcccagaatccccttccagggtgtgagttcagcctgccctgcctctatcagctctgtactggggacagtgtctgatgatgtacaagtgctttgtatgcatttgtatcctcatttcctggcttttttaggctcaggcaagggccaagtctgcatattcctcaatgtgtacccgtgcactacatcaggctggtacccaggaggtgcccacatgaatgtacagggtgactggtagatgctttgccgtaacacagcggtgtggcacaggaaccagtatctattctggctggtcagtatccatgctgacccagatgtttgatatgtgaatctcacccagctctcctggtcttgtgcccacctccttgagatctaaccacctgcagctgctaacttcacgcgcctggatttttccagttgagatggggctctgcactgtggcgcctccctaccttaaacatctgctaagggccaggcatctgtgggttctgccctgaaggcttccctggcccactggctgtagcaggccagggttgggggaaggctgtgcaggccagtgagcacacggagcccaggacctgcagctcagaccagcttggtcatgttctcctcgcccagtgactggggcccccgcttggattctcacagatgttccctgacatcagcaactgcagtcatggctcaggatttaggcctgcagaggttttcagccttgtcccagggcagggtgcgccagatgggcttctgtggccgccagcacttccggtagctgctgaggccttctgcacacccagccctgtgggcatcctagccgccccaacaacacaggctgagcccttttctggtagtagttggtggtgacaccacccccatccactggtgacatcatgcttacagagtcaaatgcccagcccccggctgccaggccaatgccacctgctggctctaatgccaggcccaggttatgcacgaaggtcccatccctctgcagctgaccgaggcataaacagaagccctcatgactggggatgagctgctttctctgtctgtggaacacggaacagaggtgggtgggaaatgccaaccccaggttaatatgcattgttattgagtagtgtctgggacacctgtccccagccaacctgtgaggaaaaacagccaagcccttaaccccagcccctctccgttctggttatctcagcatctcctgggtgatgctcaatgctgtggacatgtttatgtgggtgatagggacagaggctccgagagggcctaggacctccccctgttagcaggttcacagatgtgcctgggctgcatgctgcctcttgttcaagggtcgacttacttgttccttttcttagtacatatgtgtcagcgttgctgtcacctgtgtatcaatatgaacccttccatggccctgctgtataactttttggggatgtcagtcggtaggctggcaggcctctccactcttcaggaactccctaggtaaccctgcacttgctggtcccccaatggccatgcgaccttcaggtcatgtgccaagcccatctttcctgagagcccctctgaactgcacctcctcccttccctcgtcacactagcagcacctgcctttctgtgtgtatttctgcttagtagaaaagaacacagacgccttgagagatctgttcactgcagcttccccagtgcctggcacagagcaggtgctcggggacttagctggatagatggtgaggatgagttgtagataaaggacgctggccctccccaaaccctctgtggcctgagaacagggaacctttatccccagaacaaggcttaattctagaaatgtgaaaggtgtggccaccagacactcgtccttgtggtggttgatactgcctagaaaccaagatgtctaccctcgggttaaaactgtaagaaaaggaaaaagtccccctcacagccctgcaggcacccacatggagggactccagggcatcgaggtcccgagcgctgcggtgggtgtgcaggactctgctagcctgatggaagcatccccacccagcagttggcactgctgactcatggtggcacatctggagtgccacacccagtgtagctgtagctttgacagccatggtcctgccacatgagaaaaaacaaaacagaaatgggatggcatgtttcttaaatattcctgaaaaggcaaaaaaaaaggttctcccatccctcattttatagaagggggacccaaggaccaagttccaccagaatggcacagagcaggtttcacaaactgtgttccatagagggaaatggtgttttattgtggaagaagtttgggaaggacagaatcaaagcgctcttgctccagcagtacttctccccatctttaataacttgctccatgtcgggtggaatttgaagcactttacctgagtcactcattcattcctctgaaacaactctgaggctcagagactgttcttatagcccggatacagatgaggaaactgcggcatagcatgtgtgtgtgaacatggtgctgtttcccagctttctgggcccaaacatcctgcgggtgcagagcacattaaaccccacagtccttggtagctgattaggaaaataccactctgcagactgagggcagtgacacaggtacaaacagaagcatgacagttttttccctgatgagattttcttgattcctggtttgtattggatgcctttaccaaacagttatttactatctgactcaattaaagcttgctaatggggtgttttttaaaatcatcagggtaagttacagatacaagttcaccagactattaaactatagagttattttgtggcaggtgacattcatattgccagctgtaatacacttggaaatgaccaaaaatcatttttcccataatggaatatagaactaactacagaaaaattagagtgaatttttttctgatttggaattgctgttcctagtaaatggaatagcagtgctcttgctgtgcaatggtagtgctgtgctgcatttataattgttattaaagttctggggtacacgtgccatggtggtttgctgcacccatcaacctgtcatctacattaggtatttctcctaatgccatccctcccctagccccccaccctccaacaggccccagtgtgtgatgttcccctccctgtgtccatgtgttctcattgttcaactcccacttatgagtgagaacatgcagtgtttggttttctgttcttgtgttagtttgctgagaatgatggtttccagcttcatccatgtccctgcaaaggacatgaactcatcctttttatggctgcatagtattccatggtgtgtatgtgccacattttctttatccattctatcactgatggggatttgggttggttccaagtctttgctattttgaacagtgccgcaataaacatacctctgcatgtgtctttataatagaatgatttataatcctttgggtatatacccagtaataggattgctgggtcaaatgatatttctagttctagatccttgaggaatcaccacactgtcttccacaatgcttgaactaatttgcactcccacaaacagtataaaagtgttcttatttctccatatcctttccagcatctgttgtttcctaactaactttttagtgatcaccattctaactggcatgaggtggtatctcattgtggttttgatttgcatttctctaatgaccagtgatgatgagcttttttccaaatgtttgttggctgcataaatgtcttcttttgagaagagtctcttcatatcctttgcccactttttgatggggttgtttttttcttgtaaatttaagttctttgtagattctggatattagccctgtgtcagatggatagattgcaaaaattttctcccattctgtaggttgcctgttcactctgatgatagtttcttttgctgtgcagaagctctttagtttattagatgccatttgtccattttggctgttgttgccattgcttttggtgttttagtcatgaagtctttgcccatgcctacgtcctgaatggtattggctggctaggttttcttctaggggttgttatggttttaggtcttatgtttaagtctttaatccatcttgagttgatttttgtataaggtataaggaaggggtccagtttcagttttctgcatatggctagccagttttcgccgtaccgtttattaaatagaggatcctttccccattgttttttcaggtttgtcaaagatcagatggttgtagatgtgtggcattatttctgaggcctctgttctgttctgttccattggtctatatatctgttttactttatccttgtagtataaagtcaggtagcatgatgcctccagctttgttttttgcttaggattatcttggctatgcgggctcttttttggttccatatgaaatttgaagtagtttttttctaattctgtgaagaaagtcaatgatagctggtggggatagcattgaatctataaattactttgggcagtacggccattttcatgatatttgttcttcctattcatgagcatggaatgcttttccacttgtgtcatctcttatttccttgagacttgaagatgtccttcacatcccttgtatgttgtattcctagttattttattctgtttgtagcaattgtgaatgggagttcactaatgatttggctgtttgtctattattggtgtataggaatgcttgtaacttttgcacactgattttgtatcctgagactttgctgaagttgcttatcggcttaagattttgggctgagatgatggggttttctaaatataatcatgtcatctgcaaacagagacaatttgacttcctgtcttcctatttgaataccctttctttctttctcttgcctgattgccctggccagaagttctaatactatgttgaatagaagtgagagagggcatccttgtattgtgccggttttcgaagggaatgcttccagttgttgtccattcagtatgatattggctgtgggtttggcagaaatagctattttgagatatgttccatcaatacctagtttatttttttgtctgttttttgagacagtctcgctctgtcactcaggctggattgcagtggtgcaatcttggctcactgcaacctccacttctcaggttctatcaattctcctgcctctgcctcctgagtagctgggattgcaggtgtatgccaccatgcctggctaatttatttatttatttttttaagtggagacagggtttcaccattttagccaggctgatctcaaactcctgacctcaagtgatccgcccacctcagcctctcaaagtgctgggataacaggcgtgagccaccgcgcccagctattgggagtttttagcatgaagccatgttaaattttatcaaaggccttttctgcatctattgagataaccatgtggtttttgtcattggttctgtttatgtaatggattacatttattgatttgtgtatgttgagccagctttgcatcccagggatgaagccgacttgatcgtggtagataagctttttaatgtgctgctggattcagtttgcccgtattttattgaggatttttgcatcaatggtcatcagggaaattggcctgaaattttcattttttgttgtgtctctgcaaggtttgggtatcaggacgatgctggcctcataaaatgagttagggaggagtctctctttttctattgtttggaatagtttcagaaggaatggtaccagctcctctttgtacctctggtaaaatctggctgtgaatccgtccagtcctggactttttttggttggtaggctattaattactgcccaatttcagaacttgttattggtctgttcaggcattcgacttcttcctggtttagacttgagagggtgtgtgtccagaaatttatccatttcttctagattttctagtttatttgcatagaggtgcttatagtattctctgatggtaatttgtatttctgtgggatcagtggtgacatctactttatcattttttattgtgtttgattcttctctcttttcttcattagtctggcagtctatctattttgttgatcttttcaaaaaaaaccagcccctggattcattgatttttttgaaggatttttcatgtccctatctccttcagttctgctctgatcttatttcttgccttctgctagcttttgaatttgtttgctcttgcttctctagttcttttaattgtgatgttagggtatcaactttagatccttcctgctgtctcctgtgggcatttagtgctataaatttccgtctgaacactgctttagctgtgtcccacagattctggtacattgtgtctttgctctcattggtttcaaagaacttatttatttctaccttaatttcattatttacccaagaatcattcaggagcaggtttttcggtttccatgtggttgtgtgttttgagtgagtttcttaatcctgagttctaattcgatggcactgtggtctgacagactgttgtttcctttcttttgcatttgctaaggagtgttttacttccaattacgtggtcaattttagaaaaagtgcgatgaggtgctgagaagaatgtatgttctgttgatttggggtggagagttctgtagatgtctattaggtctgcttggtccagagctgagttcaagtcctgaatatctttgttaattttctgtctcattgatctaatattgacagtggggtgttaaagtctcccaatattattgtgtgggagtctaagtctctgtgtatgtctctaagtacttgctttatgaatctgggtggtcctgtattgggtgcatatatatttaggatagttagcacttctttttgcattgatccctttaccattatgtaatgccctcctttgatctttgttggtttaaagtctgttttatcagacactaggattggaacccctgctatttttgctttccatttgcttggtaaatcttcctccatccctttattttgagactatatgtgtctttgcacgtgaaatgggtcttctgaatacagcacaccgatggattttgactcttgattgaatttgccagactgtgtcttttaactgggggatttagcctgtttacatttaaggccactgttatgtgtgaatttaatcctgtcattatgatgctagctggttgttttgcccattagttgatgcagtttcttcatagcatcgatggtctttacaatttggtatgtttttgcagtggctggtactagttgttcctttccatgtctagcgcttccttcaggagctcttgtaacgcaggcctggtggtgatagaatctctcagcatttgcttgtctgtaaagaattttatttctccttcacttatgaagcttagtttagctagatatgaaattctgggttgaaaattcttttaagaatgttgaatattggcccccactctcttctggcttgtagggtttctgcagagagatctgctgttattctgatgggcttcccactttgtgggtaacccgacctttctctctggcttccccttaacatttttccttcatttcaaccttggcgaatctgactattctgtgtcttggagttgctcttcttgtggagtatctttgtggtgttctctgtatttcctgaatttgttggcctgtcttgctaggttggggaagttctcctggataatatcctgaagagtgttttccaacttggttctattctccccttcactttcagttacaccaattaaacgtagatttggtcttttcatagtcctgtatttcttggaggctttgttcgtttctttttcactcttttttctctcatcttcttttcttgctttattcctttgagttgatcttaaatctctgatattctttcttccgcttgatcagttcagctattgataattgtgtatgcttcacgaagttcttgtgctgtgtttttcagctccatcaggtcatttatattcttctctaaactggttattctagttaacaattcgtcttttttcaaggttcttagcttccttgcattgctcctttagctcagaggagtttgttattatccaccttctgaagcctacttctgtcaattcgtgaaactcattctccatcctgttttgttcccttgctgacgaggagttgtgatcctttgtaggagaagaggcgttctggtttttcgaattttcaggcttttttgcactggtttctccccatcttcatggatttatctacctttggtctttgatgttggtggccttcagatgaggtttctttgtggacatcctttttgttgatgttgatgcccttcctttgttagttttccttctaccagtcaggcccctctgctgcaggtctgctggagtttgctggaggtccactccagaccctgtttgcttgggtatcaccagtggaggctgcagaacagcaaagatcgctgcctggaggctttgtcccaatggggcacccgccagatgccaggtgaagctctcctgtatgaggtgtctctttgtcaggaggcacagggatcagggacccacttcaggaggcagtccgtcccttagcagaactctagtgctgtgttgggagaaccactgctctcttcagagccggcaggcaggaacatttaagtctgctgaagctgtgcccacagccaccccttcccccagttgctctgtcccagggagatggggttttatctataagcccctgactggggctgctgcctttctttcagagatgctttgcccagagaggaggaatctagtgaggcagtctggctacagtggttttggggagctgcagtgtgctctacccacttggaacttcccggtggctctgtttacactgggagggcaaaaccgcctactcaagcctcagtaatggcggatgctcctccccccttcccccaccaagctcgagcatcccgggtcgacttcagactgctgtgctggcagcaagaatttcaagccagtggatcttagcttgctaggctccgtggtggtgggatccgctgagctaaacagcttggctccttggcttcggccccctttctagggaagtgaacggttctgtctcgctggtgttccagatgccactggggtatgaaaaaaaaaaaaaaaaactgcagctagctcagtgtctgccctaaccagtgcccagttttgtgcttgaaacccagggccctggtggcataggcacccaagggaatctcctggtctatgggttgtgaagaccctgggaaaagtgtagtatctgggccagaatgcactgttacagcacagtccccctcatggcttcccttggctaggggagggagttccccaaccccttgcacttcccgggtgaggcgacgccccaccctgcttcagctcaccctctgtgggctacacccaccgtctaaccagtccaaatgagataagccgggtacctcagttggaaatgcagcaatcacccaccttgtgcattgatctcactgggaactgcagaccagagctgttcctatttggccgtattgccagcctccaatttttttttaataaagtaggagtaggtcaggtctggaggggctgagaaaagttcttggttcacagagtagggaaaatgagctagggggacaccccagaacttgtccttgatgtatttcactgtctcaaaatcagcctgaaataggaagtagctgaagagtctcaggtctgcccctacagggcaggcacccacaaagaaggaaagagggcctggggctgcaggtggaagtgccagctggccccttggcggcagctccattggcgggcccagttaggggaacaccacagctgcctgtgcagtgctctgtcctgctcctcaccctcctgggcatctgtggtgcttagaccctgggccagcacttgccccttcccaccagcccaccttacaccctgggaaggcccctcaccaatacaaagatacacgtgtaggcacacatttagaaattagaatttgatgagtgcagttcagtgacccagtcactgttaactctgtcactgtccctgtttcagctcatacattcagtgctcaaaattcagctctcagctgaatttgtttgttttccatgaaaggcagatgacatgggtgatgtgagcacccttcttcctctcccaggacagatgactctgctcaattaatgaagacatggtctcctgggaggctttctaaatgttgtcatttgagttcccaccaaagtcagaaggcagagggatccagggtcggaaaggaggcccccgtgtcatgccccctgtgtctgtgttacagctggtgagcgacctgctggaattctgcttctacaccttccgagagtcccatgcgctgaaggtagagttccccgcaatgctggtggagatcatcagcgaccagctgcccaaggtggagtcggggaacgccaagccgctctacttccaccggaagtgactgcccgctgcccagaagaactttgccttaagtttccctgtgttgttccacacccagaaggacccaagaaaacctgtttttaacatgtgatggttgattcacacttgttcaacagtttctcaagtttaaagtcatgtcagaggtttggagccgggaaagctgtttttccgtggatttggcgagaccagagcagtctgaaggattccccacctccaatcccccagcgcttagaaacatgttcctgttcctcgggatgaaaagccatatctagtcaataactctgattttgatattttcacagatggaagaagttttaactatgccgtgtagtttctggtatcgttcgcttgttttaaaagggttcaaggactaacgaacgttttaaagcttacccttggtttgcacataaaacgtatagtcaatatggggcattaatattcttttgttattaaaaaaacacaaaaaaataataaaaaaatatatacagattcctgttgtgtaataacagaactcgtggcgtggggcagcagctgcctctgagccctcgctcgtccacggtcttctgcatcactggtatacacactcgttagcgtccatttcttatttaattagaatggataagatgatgttaaatgccttggtttgatttctagtatctattgtgttggctttacaaataattttttgcagtcttttgctgtgctgtacattactgtatgtataaattatgaaggacctgaaataaggtataaggatcttttgtaaatgagacacatacaaaaaaaatctttaatggttaataggatgaatgggaaagtatttttgaaagaattctattttgctggagactatttaagtactatctttgtctaaacaaggtaatttttttttgtaaagtgcaatgtcctgcatgcataatgaaccgtttacagtgtatttaagaaagggaaagctgtgccttttttagcttcatatctaatttaccattattttacagtctctgttgtaaataaccacactgaaacctcttcggttgtcttgaaacctttctactttttctgtactttttgttttgttcttggtctcccgcttggggcatttgtgggactccagcacgttttctggcttctgcttcatcctgctccatcggggaatgacacactgcggtgtctgcagctcctggaaggtgtcatttgacaacacatgtgggagaggaggtccttggagtgctgcagctttgggaaagctgcctcgtttcccttttcctctagaagcagaaccagctctacgagagtgagactgggaacttgatggctcagagagcatcttttcctcccattttagaaaatcagattttctcctgtgggaaaaaaaaattccatgcactctctctctgttaaagatcagctattcccttctgatcttggaaagaggttctgcactcctggaaccggtcacaggaacgcacagatcatggcaggatgcgctgggacggcccatcttggcaaggttcagtctgaatggcatggagaccgggagatagaggggttttagatttttaaaaggtaggttttaaaaataagttttatacataaacagttttggagaaaaattacagatcatataagcaagacagtggcactaaaatgtttaattcattaatctgtttgtttggcactgatgcaatgtatggcttttctcttgccccaaatcacaaacatatgtatctttggggaaactaacaatatgattgcactaaataaactactttgaatagaggccaaattaatcttttaaaaatgatgataatcatcaggtttactcagtgaaatcatattaattattttccaaaatctaaaagctgtagctggagaagcccatggccacgaggaagcagcaattaattagatcaacacttttctccagggttcaccatgcaggcaacattaccttgtctttcaaaagacacctgccttatgcaaggggaaacctgtgaaagctgcactcagagggaggagtttttcttacataatttgcaatttcaggaatttaatttataggcagatctttaaatacagtcaacttacggtgcacagtaatatgaaagccacactttgaaggtaataaatacacagcatgcagactgggagttgctagcaaacaaatggcttacttacaaaagcagcttttagttcagacttagtttttataaaatgggaattctgacttacttaaccaggtttgggatggagatggtctgcatcagctttttgtattaacaaagttactggctctttgtgtgtctccaggtaactttgcttgattaaacagcaaagccatattctaaattcactgttgaatgcctgtcccagtccaaattgtctgtctgctcttatttttgtaccatattgctcttaaaaatcttggtttggtacagttcataattcaccaaaagttcatataatttaaagaaacactaaattagtttaaaatgaagcaatttatatctttatgcaaaaacatatgtctgtctttgcaaaggactgtaagcagattacaataaatcctttactttaatcacc

SEQ ID NO: 1117 - RNA, 19 nt, synthetic construct
  source 1..19: mol_type = other RNA
gcctgtaccaaggctttaa

SEQ ID NO: 1118 - RNA, 19 nt, synthetic construct
  source 1..19: mol_type = other RNA
ttaaagccttggtacaggc

SEQ ID NO: 1119 - DNA, 19 bp, synthetic construct
  source 1..19: mol_type = other DNA
gaaggtgaaggtcggagtc

SEQ ID NO: 1120 - DNA, 20 bp, synthetic construct
  source 1..20: mol_type = other DNA
gaagatggtgatgggatttc

SEQ ID NO: 1121 - DNA, 18 bp, synthetic construct
  source 1..18: mol_type = other DNA
tctggcttctgcttcttc

SEQ ID NO: 1122 - DNA, 19 bp, synthetic construct
  source 1..19: mol_type = other DNA
cttccaagagcaagttctg

SEQ ID NO: 1123 - DNA, 21 bp, synthetic construct
  source 1..21: mol_type = other DNA
aaggacagcactctcaggacc

SEQ ID NO: 1124 - RNA, 21 nt, synthetic construct
  source 1..21: mol_type = other RNA
cacgtacgcggaatacttcga

SEQ ID NO: 1125 - RNA, 23 nt, synthetic construct
  source 1..23: mol_type = other RNA
tcgaagtattccgcgtacgtgat

SEQ ID NO: 1126 - DNA, 21 bp, synthetic construct
  source 1..21: mol_type = other DNA
tgtatgaactatgccagggga

SEQ ID NO: 1127 - DNA, 22 bp, synthetic construct
  source 1..22: mol_type = other DNA
tggaattgtgcttagtagcagc

SEQ ID NO: 1128 - DNA, 26 bp, synthetic construct
  source 1..26: mol_type = other DNA
caccaaatcagccttcagttcgttcg

SEQ ID NO: 1129 - DNA, 22 bp, synthetic construct
  source 1..22: mol_type = other DNA
gatggattgcacgcaggttctc

SEQ ID NO: 1130 - DNA, 20 bp, synthetic construct
  source 1..20: mol_type = other DNA
gaacacggcggcatcagagc

SEQ ID NO: 1131 - DNA, 30 bp, synthetic construct
  source 1..30: mol_type = other DNA
cgcttgggtggagaggctattcggctatga